(19) United States
(12) Patent Application Publication
(10) Pub. No.: US 2022/0380463 A1
(43) Pub. Date: Dec. 1, 2022

(54) ENGINEERED PH-DEPENDENT ANTI-CD3 ANTIBODIES, AND METHODS FOR THEIR GENERATION AND USE

(71) Applicant: ADIMAB, LLC, Lebanon, NH (US)

(72) Inventors: James GEOGHEGAN, Lebanon, NH (US); Bianka PRINZ, Lebanon, NH (US); Robert PEJCHAL, Lebanon, NH (US)

(21) Appl. No.: 17/617,019

(22) PCT Filed: Jun. 8, 2020
(86) PCT No.: PCT/US2020/036657

§ 371 Date: Dec. 7, 2021

Related U.S. Application Data
(60) Provisional application No. 62/858,968, filed on Jun. 7, 2019.

(51) Int. Cl. C07K 16/28

(52) U.S. Cl. CPC C07K 16/2809; C07K 2317/14; C07K 2317/24; C07K 2317/33; C07K 2317/55; C07K 2317/565; C07K 2317/92

(57) ABSTRACT

Engineered pH-dependent anti-CD3 binding domains and antibodies and/or antigen-binding domains comprising same, including multispecific antibodies, with, inter alia, desirable T-cell activation and (re)directed target cell killing potency and developability, profiles are provided, as well as methods for their identification, isolation, and generation, and methods for their preparation and use.

### RELATED APPLICATIONS

[0001] This application is a U.S. Nat'l Phase Appl. submitted under 35 U.S.C. 371 based on Int'l Appl. No. PCT/US2020/036657, filed Jun. 8, 2020, which claims ppage riority to U.S. Provisional Appl. No. 62/858,968, filed Jun. 7, 2019, all of which are hereby incorporated by reference in their entirety.

### SEQUENCE LISTING

[0002] The instant application contains a Sequence Listing which has been submitted in ASCII format via EFS-Web and is hereby incorporated by reference in its entirety. Said ASCII copy, created on Oct. 15, 2021, is named “11604300002001.txt” and is 631,273 bytes in size.

### FIELD OF THE INVENTION

[0003] The invention relates, inter alia, to engineered pH-dependent anti-Cluster of Differentiation 3 (CD3) antibodies, including multispecific antibodies, and functional fragments thereof, and methods and reagents for their identification, isolation, preparation, and use.

### BACKGROUND OF THE INVENTION

[0004] Cell proliferative disorders, such as cancer, are characterized by the uncontrolled growth of cell subpopulations. They are the leading cause of death in the developed world and the second leading cause of death in developing countries, with a total number of new cancer cases per year expected to rise to 23.6 million by 2030. The National Cancer Institute estimates that almost 2 million new cases of cancer will be diagnosed in the U.S. and greater than 600,000 Americans will die of cancer in 2018. Cancer care thus represents a significant and ever-increasing societal burden.

[0005] The idea of using the cytotoxic capacity of T cells to kill tumor cells through use of CD3 targeting bispecific antibodies dates back to the mid-1980s. (Staerz et al. Nature 1985 314: 628-32). Many bispecific antibodies developed to date contain a first binding site specific to CD3 for T-cell recruitment and activation, and a second binding site for a targeted disease-associated antigen, such as an antigen produced by a tumor cell. CD3 bispecific antibodies trigger the CD3 surface receptor on T cells by binding to their second target protein expressed on tumors such that available T cells can bind to target-expressing cells via bridging by the CD3 bispecific antibody, irrespective of the peptide/MHC specificity of their T-cell receptor. (See, e.g., Bassan, 2012, Blood 120:5094-95). Bridging of T cells and tumor cells using CD3 bispecific antibodies can induce dramatic regression of advanced-stage malignancies and, in some cases, lead to complete remission. Currently, more than 25 different CD3 bispecific antibodies are in clinical development for treatment of hematologic malignancies or solid cancers by targeting CD19, CD20, CD33, and CD123, or EpCAM, HER2, PSMA, and CEA, respectively. (See, e.g., Liu et al. Front Immunol 2017 8:38).

[0006] While bispecific antibodies have shown considerable benefits over monospecific antibodies for the treatment and the detection of cancer, broad commercial application of bispecific antibodies has been hampered by the lack of efficient/low-cost production methods, the lack of stability of bispecific polypeptides and the lack of long half-lives in humans. A large variety of methods have been developed over the last few decades to produce bispecific monoclonal antibodies. However, many candidate bispecific antibodies with exquisite selectivity and high potency toward the target of interest often have problems in downstream development and clinical efficacy activities, including polyspecific binding (or “polyspecificity”); off-target binding; nonspecific binding; poor expression levels or profiles in eukaryotic host cells, such as mammalian host cells and yeast cells; poor chemical and physical properties, such as poor stability during storage (e.g., poor/low “shelf-life” stability), poor (low) solubility, poor (high) viscosity, propensity to aggregate, and the like; and poor clinical and biophysical profiles, such as poor pharmacokinetic profiles, poor pharmacodynamic profiles, fast or poor in vivo clearance rates, short circulation half-life, some of which result in termination of their development.

[0007] Certain techniques and assays exist to assess many of the aforementioned developability characteristics for discovered antibodies in the context of downstream development activities (“post-discovery antibodies”), such as CIC, SIC, BVP-ELISA, TMA, and other assays; however, such assays are typically not amenable to high-throughput formats in early antibody discovery platforms. Furthermore, assessment of these attributes typically requires milligram to gram quantities of protein, thus often imposing a de facto limitation on the number of leads that can be pragmatically considered for development, and consequently reducing the likelihood of program success. Consequently, significant resources are often expended attempting to fix poorly behaving lead candidates with few backups available in later stages of development.

[0008] A variety of anti-CD3 antibodies are known in the art, including monoclonal and bispecific antibody formats. See, e.g., U.S. Pat. Nos. 7,262,276; 7,635,472; 7,862,813; 9,587,021; and 10,174,124. However, many of these anti-CD3 antibodies possess developability issues, such as those outlined above, and/or elicit production of cytokines, often leading to toxic cytokine release syndrome (CRS). Because the anti-CD3 binding domain of the bispecific antibody engages all T cells, the high cytokine-producing CD4 T cell subset is recruited. Accordingly, there is an unmet need for the provision for anti-CD3 antibodies that display desirable developability and/or CRS risk profiles and are safe and efficacious in, for example, binding specifically to CD3 expressed on T-cells, activating T-cells and (re)-directing the activated T-cells to kill target cells, and doing this with diminished risk of eliciting CRS.

[0009] One approach to developing CD3 binding domains that display desirable CRS risk profiles, is to engineer CD3 binding domains with pH-dependent antigen binding. Incorporation of histidines and/or other ionizable residues into the binding interfaces of antibodies and other proteins has previously been used to engineer pH-dependent antigen-binding (see, e.g., Igawa et al., Nature Biotechnology 28:1203-1207 (2010)). Protonation of histidine side chains in binding interfaces may alter electrostatic interactions and/or induce conformational changes that lead to pH-dependent differences in binding affinity (Gera et al., PLOS ONE 7(11) e48928. doi:10.1371/2012). Recognizing that the pH range of human blood is about 7.6-7.8, whereas tumor cells have an extracellular pH of about 6.3-6.5 due at least in part to accumulation of metabolic acids that are inefficiently cleared because of poor tumor vascularization, Applicant's engineered pH-dependent CD3 binding domains with preferential CD3 binding at low(er) pH values promote binding and activity in and around the tumor microenvironment. Without being bound by theory, it is believed that CD3 binding domains engineered to preferably bind to CD3 at a lower pH, e.g., pH˜ 6, may result in selective and sustained cytotoxic activity at or around the tumor site, thereby potentially reducing or eliminating off-target effects as well as improving half-life and dosing.

### SUMMARY OF THE INVENTION

[0010] The present disclosure relates to engineered pH-dependent anti-CD3 antibodies and antigen-binding fragments thereof, which antibodies and antigen-binding fragments optionally bind to CD3 and/or CD3-expressing cells with greater binding affinities at pH 6.0 than at physiological pH (pH 7.4) and methods of using the same.

[0011] In certain embodiments, the disclosure provides an antibody comprising a CD3 binding domain selected from the group consisting of ADI-48576, ADI-48577, ADI-48587, ADI-48592, ADI-48595, ADI-48635, ADI-48643, ADI-48645, ADI-48650, ADI-48652, and ADI-48666.

[0012] In certain embodiments, the disclosure provides an antibody comprising a CD3 binding domain selected from the group consisting of ADI-48592, ADI-48595, ADI-48650, ADI-48652, ADI-48662, and ADI-48666.

[0013] In certain embodiments, the disclosure provides an antibody comprising a CD3 binding domain selected from the group consisting of ADI-48588, ADI-48587, ADI-48577, ADI-48590, ADI-48581, ADI-48575, ADI-48593, ADI-48591, ADI-48647, ADI-48636, ADI-48586, ADI-48646, ADI-48638, ADI-48597, ADI-48601, ADI-48576, ADI-48643, ADI-48624, ADI-48632, ADI-48635, and ADI-48645.

[0014] Analysis of 258 unique clones identified using methodology described herein revealed consensus motifs within a CDRH3 region. In some embodiments, the disclosure provides an antibody comprising a CD3 binding domain, CDRH3, wherein the CDRH3 binding domain comprises a consensus motif, the consensus motif comprising the sequence AX₁DX₂YX₃HX₄FYDV, wherein X₁ is R or H, wherein X₂ is A or H, wherein X₃ is G, H, or P, wherein X₄ is Y, H, D, V, E, S, N, L, M, I, G, A, Q, or T, and wherein, optionally, at least one of X₁, X₂, X₃, and X₄ is substituted with H (SEQ ID NO: 1).

[0015] In some embodiments, the disclosure provides an antibody comprising a CD3 binding domain, CDRH3, wherein the CDRH3 binding domain has a consensus motif represented by the sequence ARDX₁YGX₂X₃X₄YDX₅ wherein X₁ is A or H, wherein X₂ is R or H, wherein X₃ is H or Y, wherein X₄ is F or H, wherein X₅ is H or V, and wherein, optionally, at least one of X₁, X₂, X₃, X₄, and X₅ is substituted with H (SEQ ID NO: 2).

[0016] In some embodiments, the disclosure provides an antibody comprising a CD3 binding domain, CDRH3, wherein the CDRH3 binding domain comprises a consensus motif, the consensus motif comprising the sequence ARDAHX₁X₂YX₃X₄DX₅, wherein X₁ is G, E, or R, wherein X₂ is R or H, wherein X₃ is F or H, wherein X₄ is Y or H, wherein X₅ is V or H, and wherein, optionally, at least one of X₂, X₃, X₄, and X₅ is substituted with H (SEQ ID NO: 3).

[0017] In some embodiments, the disclosure provides an antibody comprising a CD3 binding domain, CDRH3, wherein the CDRH3 binding domain comprises a consensus motif, the consensus motif comprising the sequence ARDAX₁HRX₂FYDV, wherein X₁ is H, Y, S, G, A, T, V, or R, wherein X₂ is Y or H, and wherein, optionally, at least one of X₁ and X₂ is substituted with H (SEQ ID NO: 4).

[0018] In some embodiments, the disclosure provides an antibody comprising a CD3 binding domain, CDRH3, wherein the CDRH3 binding domain comprises a consensus motif, the consensus motif comprising the sequence ARDX₁YHRYFYDX₂, wherein X₁ is H or A, wherein X₂ is H, V, or M, and wherein, optionally, at least one of X₁ and X₂ is substituted with H (SEQ ID NO: 5).

[0019] In some embodiments, the disclosure provides an antibody comprising a CD3 binding domain, CDRH3, wherein the CDRH3 binding domain comprises a consensus motif, the consensus motif comprising the sequence AX₁DAYX₂X₃X₄HX₅DV, wherein X₁ is R or H, wherein X₂ is G or H, wherein X₃ is H or R, wherein X₄ is N, F, or Y, wherein X₅ is Y or H, and wherein, optionally, at least one of X₁, X₂, X₃, and X₅ is substituted with H (SEQ ID NO: 6).

[0020] In some embodiments, the disclosure provides an antibody comprising a CD3 binding domain, CDRH3, wherein the CDRH3 binding domain comprises a consensus motif, the consensus motif comprising the sequence ARDX₁X₂GRYFYDV, wherein X₁ is M, Q, or H, wherein X₂ is R or H, and wherein, optionally, at least one of X₁ and X₂ is substituted with H (SEQ ID NO: 7).

[0021] In some embodiments, the disclosure provides an antibody comprising a CD3 binding domain, CDRH3, wherein the CDRH3 binding domain comprises a consensus motif, the consensus motif comprising the sequence ARDX₁X₂X₃RYFYDX₄, wherein X₁ is H or A, wherein X₂ is T, Y, or H, wherein X₃ is G or H, wherein X₄ is V or H, and wherein, optionally, at least one of X₁, X₂, X₃, and X₄ is substituted with H (SEQ ID NO: 8).

[0022] In some embodiments, the disclosure provides an antibody comprising a CD3 binding domain, CDRH3, wherein the CDRH3 binding domain comprises a consensus motif, the consensus motif comprising the sequence AX₁DX₂X₃X₄X₅X₆X₇X₈DX₉, wherein X₁ is R or H, wherein X₂ is A, H, M, or Q, wherein X₃ is Y, H, S, G, A, T, V, or R; wherein X₄ is G, H, P, E, or R; wherein X₅ is H or R, wherein X₆ is Y, N, F, H, D, E, S, L, M, I, G, A, Q, or T; wherein X₇ is F or H; wherein X₈ is Y or H; wherein X₉ is V, H, or M; and, optionally, wherein at least one of X₁, X₂, X₃, X₄, X₅, X₆, X₇, X₈, and X₉ is H (SEQ ID NO: 58).

[0023] In some embodiments, the disclosure provides an antibody comprising a CD3 binding domain, CDRH3, wherein the CDRH3 binding domain comprises a consensus motif, the consensus motif comprising the sequence ARDAX₁X₂X₃X₄FYDX₅, wherein X₁ is T, H, or Y, wherein X₂ is G or H, wherein X₃ is H or R, wherein X₄ is V or Y, wherein X₅ is V or H, and wherein, optionally, at least one of X₁, X₂, X₃, and X₅ is substituted with H (SEQ ID NO: 593).

[0024] In some embodiments, the disclosure provides an antibody comprising a CD3 binding domain, CDRH3, wherein the CDRH3 binding domain comprises a consensus motif, the consensus motif comprising the sequence AX₁DX₂X₃X₄X₅X₆X₇YDX₈, wherein X₁ is R or H, wherein X₂ is H or A, wherein X₃ is H or Y, wherein X₄ is H, G, or P, wherein X₅ is R or H, wherein X₆ is Y, I, or V, wherein X₇ is F or H, wherein X₈ is V or H, and wherein, optionally, at least one of X₁, X₂, X₃, X₄, X₅, X₇, and X₈ is substituted with H (SEQ ID NO: 596).

[0025] In some embodiments, the disclosure provides an antibody comprising a CD3 binding domain, CDRH2, wherein the CDRH2 binding domain comprises a consensus motif, the consensus motif comprising the sequence WIDLENANTIYDAKFQG (SEQ ID NO: 9).

[0026] In some embodiments, the disclosure provides an antibody comprising a CD3 binding domain, CDRH2, wherein the CDRH2 binding domain comprises a consensus motif, the consensus motif comprising the sequence X₁INPX₂TGX₃TX₄YSQKFQG, wherein X₁ is W or Y, wherein X₂ is A, S, D, G, N, L, V, H, or Q, wherein X₃ is A, T, or S, and wherein X₄ is K, V, T, D, Y, F, or A (SEQ ID NO: 10).

[0027] In some embodiments, the disclosure provides an antibody comprising a CD3 binding domain, CDRH2, wherein the CDRH2 binding domain comprises a consensus motif, the consensus motif comprising the sequence X₁IX₂AGTGX₃TX₄YSQKFQG, wherein X₁ is W, Y, or F, wherein X₂ is T, N, or D, wherein X₃ is A, T, or L, and wherein X₄ is A, K, V, H, T, or N (SEQ ID NO: 11).

[0028] In some embodiments, the disclosure provides an antibody comprising a CD3 binding domain, CDRH2, wherein the CDRH2 binding domain comprises a consensus motif, the consensus motif comprising the sequence X₁IDAGTGX₂TX₃YSQKFQG, wherein X₁ is S or W, wherein X₂ is L, N, D, or F, and wherein X₃ is D, Y, or K (SEQ ID NO: 12).

[0029] In some embodiments, the disclosure provides an antibody comprising a CD3 binding domain, CDRH2, wherein the CDRH2 binding domain comprises a consensus motif, the consensus motif comprising the sequence X₁IX₂AGTGATX₃YSQKFQG, wherein X₁ is G, D, or S, wherein X₂ is I or D, and wherein X₃ is K or D (SEQ ID NO: 13).

[0030] In some embodiments, the disclosure provides an antibody comprising a CD3 binding domain, wherein the CDRH2 binding domain comprises a consensus motif, the consensus motif comprising the sequence WINPX₁TGNTX₂YSQKFQG, wherein X₁ is D, T, L, S, or A, and wherein X₂ is D, V, L, or N (SEQ ID NO: 14).

[0031] In some embodiments, the disclosure provides an antibody comprising a CD3 binding domain, CDRH2, wherein the CDRH2 binding domain comprises a consensus motif, the consensus motif comprising the sequence X₁INAGTGX₂TX₃YSQKFQG, wherein X₁ is Y or W, wherein X₂ is N, D, or A, and wherein X₃ is I or V (SEQ ID NO: 15).

[0032] In some embodiments, the disclosure provides an antibody comprising a CD3 binding domain, CDRH2, wherein the CDRH2 binding domain comprises a consensus motif, the consensus motif comprising the sequence X₁INPX₂TGX₃TKYSQKFQG, wherein X₁ is W or Y, wherein X₂ is D, I or Y, and wherein X₃ is D, Y, or E (SEQ ID NO: 16).

[0033] In some embodiments, the disclosure provides an antibody comprising a CD3 binding domain, CDRH2, wherein the CDRH2 binding domain comprises a consensus motif, the consensus motif comprising the sequence SIX₁AGTGX₂TKYSQKFQG, wherein X₁ is N or V, and wherein X₂ is A or I (SEQ ID NO: 17).

[0034] In some embodiments, the disclosure provides an antibody comprising a CD3 binding domain, CDRH2, wherein the CDRH2 binding domain comprises a consensus motif, the consensus motif comprising the sequence SINAGTGX₁TX₂YSQKFQG, wherein X₁ is F or N, and wherein X₂ is Y or D (SEQ ID NO: 18).

[0035] In some embodiments, the disclosure provides an antibody comprising a CD3 binding domain, CDRH2, wherein the CDRH2 binding domain comprises a consensus motif, the consensus motif comprising the sequence X₁IX₂X₃GTGX₄TDYSQKFQG, wherein X₁ is D or W, wherein X₂ is N or H, wherein X₃ is A or S, and wherein X₄ is A or N (SEQ ID NO: 19).

[0036] In some embodiments, the disclosure provides an antibody comprising a CD3 binding domain, CDRH2, wherein the CDRH2 binding domain comprises a consensus motif, the consensus motif comprising the sequence: WIDPX₁TGATX₂YSQKFQG, wherein X₁ is N, H, or Y, and wherein X₂ is V or K (SEQ ID NO: 20).

[0037] In some embodiments, the disclosure provides an antibody comprising a CD3 binding domain, CDRH2, wherein the CDRH2 binding domain comprises a consensus motif, the consensus motif comprising the sequence WIX₁PX₂TGNTKYSQKFQG, wherein X₁ is D or N, and wherein X₂ is L, I, or V (SEQ ID NO: 21).

[0038] In some embodiments, the disclosure provides an antibody comprising a CD3 binding domain, CDRH2, wherein the CDRH2 binding domain comprises a consensus motif, the consensus motif comprising the sequence SINAGDANTKYSQKFQG (SEQ ID NO: 22).

[0039] In some embodiments, the disclosure provides an antibody comprising a CD3 binding domain, CDRH2, wherein the CDRH2 binding domain comprises a consensus motif, the consensus motif comprising the sequence X₁IDPX₂TGATX₃YSQKFQG, wherein X₁ is D or W, wherein X₂ is D or V, and wherein X₃ is E or D (SEQ ID NO: 23).

[0040] In some embodiments, the disclosure provides an antibody comprising a CD3 binding domain, CDRH2, wherein the CDRH2 binding domain comprises a consensus motif, the consensus motif comprising the sequence WINAGDAATVYSQKFQG (SEQ ID NO: 24).

[0041] In some embodiments, the disclosure provides an antibody comprising a CD3 binding domain, CDRH2, wherein the CDRH2 binding domain comprises a consensus motif, the consensus motif comprising the sequence X₁IX₂X₃X₄X₅X₆X₇TX₈YSQKFQG, wherein X₁ is W, S, Y, F, G, or D, wherein X₂ is N, T, D, V, or H, wherein X₃ is A, P, or S, wherein X₄ is G, A, S, N, D, L, V, H, Q, T, I, or Y, wherein X₅ is D or T, wherein X₆ is A or G, wherein X₇ is A, N, T, S, L, D, F, Y, or E, wherein X₈ is V, K, T, D, Y, F, A, H, N, L, I, or E, and, optionally, wherein at least one of X₁, X₂, X₃, X₄, X₅, X₆, X₇, and X₈ is H (SEQ ID NO: 59).

[0042] In some embodiments, the disclosure provides an antibody comprising a CD3 binding domain, CDRH2, wherein the CDRH2 binding domain comprises a consensus motif, the consensus motif comprising the sequence WIDAGTGX₁TX₂YSQKFQG, wherein X₁ is L, F, N, or A and wherein X₂ is T or K (SEQ ID NO: 595).

[0043] In some embodiments, the disclosure provides an antibody comprising a CD3 binding domain, CDRH1, wherein the CDRH1 binding domain comprises FNIKDYHMH (SEQ ID NO: 25), SNIKDYYMH (SEQ ID NO: 26), or SNIKDYHMH (SEQ ID NO: 27).

[0044] In some embodiments, the disclosure provides an antibody comprising a CD3 binding domain, CDRH1, wherein the CDRH1 binding domain comprises a consensus motif, the consensus motif comprising the sequence YTFX₁X₂X₃X₄MH, wherein X₁ is A, K, D, Q, E, N, T, L, Y, S, P, G, H or V, wherein X₂ is T, S, or A, wherein X₃ is Y or I, and wherein X₄ is A, D, N, S, Y, T, I, V, L, E, P, R, or G (SEQ ID NO: 28).

[0045] In some embodiments, the disclosure provides an antibody comprising a CD3 binding domain, CDRH1, wherein the CDRH1 binding domain comprises a consensus motif, the consensus motif comprising the sequence YTFX₁X₂X₃X₄MH, wherein X₁ is T, D, A, N, or V, wherein X₂ is D, E, G, or Q, wherein X₃ is Y or D, and wherein X₄ is D, A, E, N, S, Y, or V (SEQ ID NO: 29).

[0046] In some embodiments, the disclosure provides an antibody comprising a CD3 binding domain, CDRH1, wherein the CDRH1 binding domain comprises a consensus motif, the consensus motif comprising the sequence YTFTSX₁X₂MH, wherein X₁ is A, D, or T, and wherein X₂ is D, F, A, M, V, or Y (SEQ ID NO: 30).

[0047] In some embodiments, the disclosure provides an antibody comprising a CD3 binding domain, CDRH1, wherein the CDRH1 binding domain comprises a consensus motif, the consensus motif comprising the sequence YTFX₁X₂YX₃MH, wherein X₁ is N or T, X₂ is Q or N, and X₃ is S, T, or A (SEQ ID NO: 31).

[0048] In some embodiments, the disclosure provides an antibody comprising a CD3 binding domain, CDRH1, wherein the CDRH1 binding domain comprises a consensus motif, the consensus motif comprising the sequence YTFX₁X₂YVMH, wherein X₁ is I or N, and wherein X₂ is K or R (SEQ ID NO: 32).

[0049] In some embodiments, the disclosure provides an antibody comprising a CD3 binding domain, CDRH1, wherein the CDRH1 binding domain comprises a consensus motif, the consensus motif comprising the sequence FNIKDYYMH (SEQ ID NO: 47).

[0050] In some embodiments, the disclosure provides an antibody comprising a CD3 binding domain, CDRH1, wherein the CDRH1 binding domain comprises a consensus motif, the consensus motif comprising the sequence YTFX₁X₂YX₃MH, wherein X₁ is E, S, or T, wherein X₂ is S or D, and wherein X₃ is A or D (SEQ ID NO: 31).

[0051] In some embodiments, the disclosure provides an antibody comprising a CD3 binding domain, CDRL3, wherein the CDRL3 binding domain comprises a consensus motif, the consensus motif comprising the sequence X₁X₂SX₃X₄X₅RX₆, wherein X₁ is H, K, or G, wherein X₂ is Q or H, wherein X₃ is Y or H, wherein X₄ is S, H, D, T, V, M, or L, wherein X₅ is R or H, wherein X₆ is T or H, and wherein, optionally, at least one of X₁, X₂, X₃, X₄, X₅, and X₆ is substituted with H (SEQ ID NO: 33).

[0052] In some embodiments, the disclosure provides an antibody comprising a CD3 binding domain, CDRL3, wherein the CDRL3 binding domain comprises a consensus motif, the consensus motif comprising the sequence KQSYX₁X₂RT, wherein X₁ is H, V, K, W, R, L, G, Y, or Q, wherein X₂ is H, L, E, W, G, M, P, T, Q, or V, and wherein, optionally, at least one of X₁ and X₂ is substituted with H (SEQ ID NO: 34).

[0053] In some embodiments, the disclosure provides an antibody comprising a CD3 binding domain, CDRL3, wherein the CDRL3 binding domain comprises a consensus motif, the consensus motif comprising the sequence X₁QSX₂HX₃RT, wherein X₁ is K or H, wherein X₂ is H, Y, M, S, L, E, G, or W, wherein X₃ is R or K, and wherein, optionally, at least one of X₁ and X₂ is substituted with H (SEQ ID NO: 35).

[0054] In some embodiments, the disclosure provides an antibody comprising a CD3 binding domain, CDRL3, wherein the CDRL3 binding domain comprises a consensus motif, the consensus motif comprising the sequence KQSX₁X₂X₃RT, wherein X₁ is Y or H, X₂ is T, S, V, or K, X₃ is R or H, and wherein, optionally, at least one of X₁ and X₃ is substituted with H (SEQ ID NO: 36).

[0055] In some embodiments, the disclosure provides an antibody comprising a CD3 binding domain, CDRL3, wherein the CDRL3 binding domain comprises a consensus motif, the consensus motif comprising the sequence KQSX₁X₂X₃RT, wherein X₁ is H or Y, wherein X₂ is T, S, or Q, wherein X₃ is R or H, and wherein, optionally, at least one of X₁ and X₃ is substituted with H (SEQ ID NO: 36).

[0056] In some embodiments, the disclosure provides an antibody comprising a CD3 binding domain, CDRL3, wherein the CDRL3 binding domain comprises a consensus motif, the consensus motif comprising the sequence X₁QSX₂X₃X₄RT, wherein X₁ is K or H, wherein X₂ is Y or H, wherein X₃ is S, H, L, V, or K, wherein X₄ is H, R, or E, and wherein, optionally, at least one of X₁, X₂, X₃, and X₄ is substituted with H (SEQ ID NO: 598).

[0057] In some embodiments, the disclosure provides an antibody comprising a CD3 binding domain, CDRL2, wherein the CDRL2 binding domain comprises a consensus motif, the consensus motif comprising the sequence: WASTRES (SEQ ID NO: 37).

[0058] In some embodiments, the disclosure provides an antibody comprising a CD3 binding domain, CDRL1, wherein the CDRL1 binding domain comprises a consensus motif, the consensus motif comprising the sequence KSSQSLLX₁X₂X₃X₄GX₅NX₆LA, wherein X₁ is N or H, wherein X₂ is A, R, or T, wherein X₃ is R or H, wherein X₄ is T, P, or E, wherein X₅ is H or K, wherein X₆ is H or Y, and wherein, optionally, at least one of X₁, X₃, X₅, and X₆ is substituted with H (SEQ ID NO: 38).

[0059] In some embodiments, the disclosure provides an antibody comprising a CD3 binding domain, CDRL1, wherein the CDRL1 binding domain comprises a consensus motif, the consensus motif comprising the sequence KSSQSLLX₁AX₂THX₃NX₄LA, wherein X₁ is N or H, wherein X₂ is R or H, wherein X₃ is K or H, wherein X₄ is Y or H, and wherein, optionally, at least one of X₁, X₂, X₃, and X₄ is substituted with H (SEQ ID NO: 39).

[0060] In some embodiments, the disclosure provides an antibody comprising a CD3 binding domain, CDRL1, wherein the CDRL1 binding domain comprises a consensus motif, the consensus motif comprising the sequence KSSQSLLNASTAKNYLA (SEQ ID NO: 40) or KSSQSLLNARTRTNYLA (SEQ ID NO: 41).

[0061] In some embodiments, the disclosure provides an antibody comprising a CD3 binding domain, CDRL1, wherein the CDRL1 binding domain comprises a consensus motif, the consensus motif comprising the sequence KSSQSLLNX₁X₂X₃GX₄NX₅LA, wherein X₁ is S or A, wherein X₂ is R or H, wherein X₃ is E or T, wherein X₄ is H or K, wherein X₅ is H or Y, and wherein, optionally, at least one of X₂, X₄, and X₅ is substituted with H (SEQ ID NO: 42).

[0062] In some embodiments, the disclosure provides an antibody comprising a CD3 binding domain, CDRL1, wherein the CDRL1 binding domain comprises a consensus motif, the consensus motif comprising the sequence KSSQSLLNX₁X₂TGX₃NYLA, wherein X₁ is A or S, wherein X₂ is R or H, wherein X₃ is H or K, and, optionally, wherein at least one of X₂ and X₃ is substituted with H (SEQ ID NO: 594).

[0063] In some embodiments, the disclosure provides an antibody comprising a CD3 binding domain, CDRL1, wherein the CDRL1 binding domain comprises a consensus motif, the consensus motif comprising the sequence KSSQSLLX₁AX₂X₃X₄X₅NX₆LA, wherein X₁ is N or H, wherein X₂ is R or H, wherein X₃ is T or E, wherein X₄ is G or H, wherein X₅ is H or K, wherein X₆ is H or Y, and wherein, optionally, at least one of X₁, X₂, X₄, X₅, and X₆ is substituted with H (SEQ ID NO: 597).

[0064] In some embodiments, the disclosure provides an antibody or antigen-binding fragment comprising a CDRH3 binding domain comprising a consensus motif, the consensus motif comprising the sequence ARDAX₁X₂X₃X₄FYDX₅, wherein X₁ is T, H, or Y, wherein X₂ is G or H, wherein X₃ is H or R, wherein X₄ is V or Y, wherein X₅ is V or H, and wherein, optionally, at least one of X₁, X₂, X₃, and X₅ is H (SEQ ID NO: 593); a CDRH2 binding domain comprising a consensus motif, the consensus motif comprising the sequence WIDLENANTIYDAKFQG (SEQ ID NO: 9); a CDRH1 binding domain comprising a consensus motif, the consensus motif comprising the sequence FNIKDYYMH (SEQ ID NO: 47); a CDRL3 binding domain comprising a consensus motif, the consensus motif comprising the sequence KQSX₁X₂X₃RT, wherein X₁ is H or Y, wherein X₂ is T, S, or Q, wherein X₃ is R or H, and, optionally, wherein at least one of X₁ and X₃ is H (SEQ ID NO: 36); a CDRL2 binding domain comprising a consensus motif, the consensus motif comprising the sequence WASTRES (SEQ ID NO: 37); and/or a CDRL1 binding domain comprising a consensus motif, the consensus motif comprising the sequence KSSQSLLNX₁X₂TGX₃NYLA, wherein X₁ is A or S, wherein X₂ is R or H, wherein X₃ is H or K, and, optionally, wherein at least one of X₂ and X₃ is H (SEQ ID NO: 594). In some embodiments, said antibody or antigen-binding fragment is designated as a Group 1 binder comprising a CD3 binding domain selected from ADI-48592, ADI-48595, ADI-48650, ADI-48652, ADI-48662, and ADI-48666.

[0065] In some embodiments, the disclosure provides an antibody or antigen-binding fragment comprising a CDRH3 binding domain comprising a consensus motif, the consensus motif comprising the sequence AX₁DX₂X₃X₄X₅X₆X₇YDX₈, wherein X₁ is R or H, wherein X₂ is H or A, wherein X₃ is H or Y, wherein X₄ is H, G, or P, wherein X₅ is R or H, wherein X₆ is Y, I, or V, wherein X₇ is F or H, wherein X₈ is V or H, and, optionally, wherein at least one of X₁, X₂, X₃, X₄, X₅, X₇, and X₈ is H (SEQ ID NO: 596); a CDRH2 binding domain comprising a consensus motif, the consensus motif comprising the sequence WIDLENANTIYDAKFQG (SEQ ID NO: 9) or the sequence WIDAGTGX₁TX₂YSQKFQG, wherein X₁ is L, F, N, or A and wherein X₂ is T or K (SEQ ID NO: 595); a CDRH1 binding domain comprising a consensus motif, the consensus motif comprising the sequence FNIKDYYMH (SEQ ID NO: 47) or the sequence YTFX₁X₂YX₃MH, wherein X₁ is E, S, or T, wherein X₂ is S or D, and wherein X₃ is A or D (SEQ ID NO: 31); a CDRL3 binding domain comprising a consensus motif, the consensus motif comprising the sequence X₁QSX₂X₃X₄RT, wherein X₁ is K or H, wherein X₂ is Y or H, wherein X₃ is S, H, L, V, or K, wherein X₄ is H, R, or E, and, optionally, wherein at least one of X₁, X₂, X₃, and X₄ is H (SEQ ID NO: 598); a CDRL2 binding domain comprising a consensus motif, the consensus motif comprising the sequence WASTRES (SEQ ID NO: 37); and/or a CDRL1 binding domain comprising a consensus motif, the consensus motif comprising the sequence KSSQSLLX₁AX₂X₃X₄X₅NX₆LA, wherein X₁ is N or H, wherein X₂ is R or H, wherein X₃ is T or E, wherein X₄ is G or H, wherein X₅ is H or K, wherein X₆ is H or Y, and wherein, optionally, at least one of X₁, X₂, X₄, X₅, and X₆ is H (SEQ ID NO: 597). In some embodiments, said antibody or antigen-binding fragment is designated as a Group 2 binder comprising a CD3 binding domain selected from ADI-48588, ADI-48587, ADI-48577, ADI-48590, ADI-48581, ADI-48575, ADI-48593, ADI-48591, ADI-48647, ADI-48636, ADI-48586, ADI-48646, ADI-48638, ADI-48597, ADI-48601, ADI-48576, ADI-48643, ADI-48624, ADI-48632, ADI-48635, and ADI-48645.

[0066] In some embodiments, the disclosure provides an anti-CD3 antibody or antigen-binding fragment described herein, wherein said antibody or antigen-binding fragment may elicit T cell activation or T cell killing while displaying a decreased propensity to elicit cytokine production to levels capable of inducing cytokine release syndrome.

[0067] In some embodiments, the disclosure provides an anti-CD3 antibody or antigen-binding fragment described herein, wherein said antibody or antigen-binding fragment may comprise a multispecific antibody.

[0068] In some embodiments, the disclosure provides an anti-CD3 antibody or antigen-binding fragment described herein, wherein said antibody or antigen-binding fragment may comprise a bispecific antibody.

[0069] In some embodiments, the disclosure provides an anti-CD3 antibody or antigen-binding fragment described herein, wherein said antibody or antigen-binding fragment may comprise an scFv.

[0070] In some embodiments, the disclosure provides an anti-CD3 antibody or antigen-binding fragment described herein, wherein said antibody or antigen-binding fragment may comprise at least a second antigen-binding domain that specifically binds to an oncology target; an immune-oncology target; a neurodegenerative disease targets; an autoimmune disorder target; an infectious disease target; a metabolic disease target; a cognitive disorder target; a blood-brain barrier target; or a blood disease target.

[0071] In some embodiments, the disclosure provides an anti-CD3 antibody or antigen-binding fragment described herein, wherein said antibody or antigen-binding fragment may comprise at least a second antigen-binding domain that specifically binds to an antigen selected from the group consisting of: 17-IA, 4-1BB, 4Dc, 6-keto-PGF1a, 8-iso-PGF2a, 8-oxo-dG, A1 Adenosine Receptor, A33, ACE, ACE-2, Activin, Activin A, Activin AB, Activin B, Activin C, Activin RIA, Activin RIA ALK-2, Activin RIB ALK-4, Activin RIIA, Activin RUB, ADAM, ADAM10, ADAM12, ADAM 15, ADAM 17/T ACE, ADAM8, ADAM9, ADAMTS, ADAMTS4, ADAMTS5, Addressins, aFGF, ALCAM, ALK, ALK-1, ALK-7, alpha-1-antitrypsin, alpha-V/beta-1 antagonist, ANG, Ang, APAF-1, APE, APJ, APP, APRIL, AR, ARC, ART, Artemin, anti-Id, ASPARTIC, Atrial natriuretic factor, av/b3 integrin, Axl, b2M, B7-1, B7-2, B7-H, B-lymphocyte Stimulator (BlyS), BACE, BACE-1, Bad, BAFF, BAFF-R, Bag-1, BAK, Bax, BCA-1, BCAM, Bel, BCMA, BDNF, b-ECGF, bFGF, BID, Bik, BFM, BLC, BL-CAM, BLK, BMP, BMP-2 BMP-2a, BMP-3 Osteogenin, BMP-4 BMP-2b, BMP-5, BMP-6 Vgr-1, BMP-7 (OP-1), BMP-8 (BMP-8a, OP-2), BMPR, BMPR-IA (ALK-3), BMPR-IB (ALK-6), BRK-2, RPK-1, BMPR-II (BRK-3), BMPs, b-NGF, BOK, Bombesin, Bone-derived neurotrophic factor, BPDE, BPDE-DNA, BTC, complement factor 3 (C3), C3a, C4, C5, C5a, C1O, CA125, CAD-8, Calcitonin, cAMP, carcinoembryonic antigen (CEA), carcinoma-associated antigen, Cathepsin A, Cathepsin B, Cathepsin C/DPPI, Cathepsin D, Cathepsin E, Cathepsin H, Cathepsin L, Cathepsin O, Cathepsin S, Cathepsin V, Cathepsin X/Z/P, CBL, CCI, CCK2, CCL, CCL1, CCL11, CCL12, CCL13, CCL 14, CCL15, CCL16, CCL17, CCL18, CCL19, CCL2, CCL20, CCL21, CCL22, CCL23, CCL24, CCL25, CCL26, CCL27, CCL28, CCL3, CCL4, CCL5, CCL6, CCL7, CCL8, CCL9/10, CCR, CCR1, CCR10, CCR10, CCR2, CCR3, CCR4, CCR5, CCR6, CCR7, CCR8, CCR9, CD1, CD2, CD4, CD5, CD6, CD7, CD8, CD10, CD11a, CD11b, CD11c, CD13, CD14, CD15, CD16, CD18, CD19, CD20, CD21, CD22, CD23, CD25, CD27L, CD28, CD29, CD30, CD30L, CD32, CD33 (p67 proteins), CD34, CD38, CD40, CD40L, CD44, CD45, CD46, CD49a, CD52, CD54, CD55, CD56, CD61, CD64, CD66e, CD74, CD80 (B7-1), CD89, CD95, CD123, CD137, CD138, CD140a, CD146, CD147, CD148, CD152, CD164, CEACAM5, CFTR, cGMP, CINC, Clostridium botulinum toxin, Clostridium perfringens toxin, CKb8-1, CLC, CMV, CMV UL, CNTF, CNTN-1, COX, C-Ret, CRG-2, CT-1, CTACK, CTGF, CTLA-4, CX3CL1, CX3CR1, CXCL, CXCL1, CXCL2, CXCL3, CXCL4, CXCL5, CXCL6, CXCL7, CXCL8, CXCL9, CXCL10, CXCL11, CXCL12, CXCL13, CXCL14, CXCL15, CXCL16, CXCR, CXCR1, CXCR2, CXCR3, CXCR4, CXCR5, CXCR6, cytokeratin tumor-associated antigen, DAN, DCC, DcR3, DC-SIGN, Decay accelerating factor, des(1-3)-IGF-1 (brain IGF-1), Dhh, digoxin, DNAM-1, Dnase, Dpp, DPPIV/CD26, Dtk, ECAD, EDA, EDA-A1, EDA-A2, EDAR, EGF, EGFR (ErbB-1), EMA, EMMPRIN, EN A, endothelin receptor, Enkephalinase, eNOS, Eot, eotaxin1, EpCAM, Ephrin B2/EphB4, EPO, ERCC, E-selectin, ET-1, Factor IIa, Factor VII, Factor VTITc, Factor IX, fibroblast activation protein (FAP), Fas, FcR1, FEN-1, Ferritin, FGF, FGF-19, FGF-2, FGF3, FGF-8, FGFR, FGFR-3, Fibrin, FL, FLIP, Flt-3, Flt-4, Follicle stimulating hormone, Fractalkine, FZD1, FZD2, FZD3, FZD4, FZD5, FZD6, FZD7, FZD8, FZD9, FZD10, G250, Gas 6, GCP-2, GCSF, GD2, GD3, GDF, GDF-1, GDF-3 (Vgr-2), GDF-5 (BMP-14, CDMP-1), GDF-6 (BMP-13, CDMP-2), GDF-7 (BMP-12, CDMP-3), GDF-8 (Myostatin), GDF-9, GDF-15 (MIC-1), GDNF, GFAP, GFRa-1, GFR-alpha1, GFR-alpha2, GFR-alpha3, GITR, Glucagon, Glut 4, glycoprotein IIb/IIIa (GP IIb/IIIa), GM-CSF, gp130, gp72, GRO, Growth hormone releasing factor, Hapten (NP-cap or NIP-cap), HB-EGF, HCC, HCMV gB envelope glycoprotein, HCMV) gH envelope glycoprotein, HCMV UL, Hemopoietic growth factor (HGF), Hep B gp120, heparanase, Her2, Her2/neu (ErbB-2), Her3 (ErbB-3), Her4 (ErbB-4), herpes simplex virus (HSV) gB glycoprotein, HSV gD glycoprotein, HGFA, High molecular weight melanoma-associated antigen (HMW-MAA), HIV gp120, HIV IIIB gp 120 V3 loop, HLA, HLA-DR, HM1.24, HMFG PEM, HRG, Hrk, human cardiac myosin, human cytomegalovirus (HCMV), human growth hormone (HGH), HVEM, 1-309, IAP, ICAM, ICAM-1, ICAM-3, ICE, ICOS, IFNg, Ig, IgA receptor, IgE, IGF, IGF binding proteins, IGF-TR, IGFBP, IGF-I, IGF-II, IL, IL-1, IL-1R, IL-2, IL-2R, IL-4, IL-4R, IL-5, IL-5R, IL-6, IL-6R, IL-8, IL-9, IL-10, IL-12, IL-13, IL-15, IL-18, IL-18R, IL-23, interferon (INF)-alpha, INF-beta, INF-gamma, Inhibin, iNOS, Insulin A-chain, Insulin B-chain, Insulin-like growth factor 1, integrin alpha2, integrin alpha3, integrin alpha4, integrin alpha4/beta1, integrin, alpha4/beta7, integrin alpha5 (alphaV), integrin alpha5/beta1, integrin alpha5/beta3, integrin alpha6, integrin beta1, integrin beta2, interferon gamma, IP-10, 1-TAC, JE, Kallikrein 2, Kallikrein 5, Kallikrein 6, Kallikrein 11, Kallikrein 12, Kallikrein 14, Kallikrein 15, Kallikrein L1, Kallikrein L2, Kallikrein L3, Kallikrein L4, KC, KDR, Keratinocyte Growth Factor (KGF), laminin 5, LAMP, LAP, LAP (TGF-1), Latent TGF-1, Latent TGF-1 bpl, LBP, LDGF, LECT2, Lefty, Lewis-Y antigen, Lewis-Y related antigen, LFA-1, LFA-3, Lfo, LIF, LIGHT, lipoproteins, LIX, LKN, Lptn, L-Selectin, LT-a, LT-b, LTB4, LTBP-1, Lung surfactant, Luteinizing hormone, Lymphotoxin Beta Receptor, Mac-1, MAdCAM, MAG, MAP2, MARC, MCAM, MCAM, MCK-2, MCP, M-CSF, MDC, Mer, a metalloprotease, MGDF receptor, MGMT, MHC (HLA-DR), MIF, MIG, MIP, MIP-1-alpha, MK, MMAC1, MMP, MMP-1, MMP-10, MMP-11, MMP-12, MMP-13, MMP-14, MMP-15, MMP-2, MMP-24, MMP-3, MMP-7, MMP-8, MMP-9, MPIF, Mpo, MSK, MSP, mucin (Muc1), MUC18, Muellerian-inhibiting substance, Mug, MuSK, NAIP, NAP, NCAD, N-Cadherin, NCA 90, NCAM, NCAM, Neprilysin, Neurotrophin-3, -4, or -6, Neurturin, Neuronal growth factor (NGF), NGFR, NGF-beta, nNOS, NO, NOS, Npn, NRG-3, NT, NTN, OB, OGG1, OPG, OPN, OSM, OX40L, OX40R, p150, p95, PADPr, Parathyroid hormone, PARC, PARP, PBR, PBSF, PCAD, P-Cadherin, PCNA, PDGF, PDGF, PDK-1, PECAM, PEM, PF4, PGE, PGF, PGI2, PGJ2, PIN, PLA2, placental alkaline phosphatase (PLAP), PIGF, PLP, PP14, Proinsulin, Prorelaxin, Protein C, PS, PSA, PSCA, prostate specific membrane antigen (PSMA), PTEN, PTHrp, Ptk, PTN, R51, RANK, RANKL, RANTES, Relaxin A-chain, Relaxin B-chain, renin, respiratory syncytial virus (RSV) F, RSV Fgp, Ret, Rheumatoid factors, RLIP76, RPA2, RSK, Si00, SCF/KL, SDF-1, SERINE, Serum albumin, sFRP-3, Shh, SIGIRR, SK-1, SLAM, SLPI, SMAC, SMDF, SMOH, SOD, SPARC, Stat, STEAP, STEAP-II, TACE, TACI, TAG-72 (tumor-associated glycoprotein-72), TARC, TCA-3, T-cell receptors (e.g., T-cell receptor alpha/beta), TdT, TECK, TEM1, TEM5, TEM7, TEM8, TERT, testicular PLAP-like alkaline phosphatase, TfR, TGF, TGF-alpha, TGF-beta, TGF-beta Pan Specific, TGF-beta RI (ALK-5), TGF-beta RII, TGF-beta RIIb, TGF-beta RIII, TGF-beta1, TGF-beta2, TGF-beta3, TGF-beta4, TGF-beta5, Thrombin, Thymus Ck-1, Thyroid stimulating hormone, Tie, TIMP, TIQ, Tissue Factor, TMEFF2, Tmpo, TMPRSS2, TNF, TNF-alpha, TNF-alpha beta, TNF-beta2, TNFc, TNF-RI, TNF-RII, TNFRSF10A (TRAIL Rb Apo-2, DR4), TNFRSFIOB (TRAIL R2 DR5, KILLER, TRICK-2A, TRICK-B), TNFRSF10C (TRAIL R3 DcR1, LIT, TRID), TNFRSF10D (TRAIL R4 DcR2, TRUNDD), TNFRSF11A (RANK ODF R, TRANCE R), TNFRSFIIB (OPG OC1F, TR1), TNFRSF12 (TWEAK R FN14), TNFRSF13B (TACI), TNFRSF13C (BAFF R), TNFRSF14 (HVEM ATAR, HveA, LIGHT R, TR2), TNFRSF16 (NGFR p75NTR), TNFRSF17 (BCMA), TNFRSF 18 (GITR AITR), TNFRSF19 (TROY TAJ, TRADE), TNFRSF19L (RELT), TNFRSFIA (TNF R1 CD120a, p55-60), TNFRSFIB (TNF RII CD120b, p75-80), TNFRSF26 (TNFRH3), TNFRSF3 (LTbR TNF RIII, TNFC R), TNFRSF4 (OX40 ACT35, TXGP1 R), TNFRSF 5 (CD40 p50), TNFRSF6 (Fas Apo-1, APT1, CD95), TNFRSF6B (DcR3 M68, TR6), TNFRSF7 (CD27), TNFRSF8 (CD30), TNFRSF9 (4-1BB CD137, ILA), TNFRSF21 (DR6), TNFRSF22 (DcTRAIL R2 TNFRH2), TNFRST23 (DcTRAIL R1 TNFRH1), TNFRSF25 (DR3 Apo-3, LARD, TR-3, TRAMP, WSL-1), TNFSF10 (TRAIL Apo-2 Ligand, TL2), TNFSF11 (TRANCE/RANK Ligand ODF, OPG Ligand), TNFSF12 (TWEAK Apo-3 Ligand, DR3 Ligand), TNFSF13 (APRIL TALL2), TNFSF13B (BAFF BLYS, TALL1, THANK, TNFSF20), TNFSF14 (LIGHT HVEM Ligand, LTg), TNFSF15 (TLIA/VEGI), TNFSF18 (GITR Ligand AITR Ligand, TL6), TNFSFIA (TNF-a Conectin, DIF, TNFSF2), TNFSF1B (TNF-b LTa, TNFSF1), TNFSF3 (LTb TNFC, p33), TNFSF4 (OX40 Ligand gp34, TXGP1), TNFSF5 (CD40 Ligand CD154, gp39, HIGM1, IMD3, TRAP), TNFSF6 (Fas Ligand Apo-1 Ligand, APT1 Ligand), TNFSF7 (CD27 Ligand CD70), TNFSF8 (CD30 Ligand CD153), TNFSF9 (4-1BB Ligand CD137 Ligand), TP-1, t-PA, Tpo, TRAIL, TRAIL R, TRAIL-R1, TRAIL-R2, TRANCE, transferring receptor, TRF, Trk, TROP-2, TSG, TSLP, tumor-associated antigen CA 125, tumor-associated antigen expressing Lewis Y related carbohydrate, TWEAK, TXB2, Ung, uPAR, uPAR-1, Urokinase, VCAM, VCAM-1, VECAD, VE-Cadherin, VE-cadherin-2, VEFGR-1 (flt-1), VEGF, VEGFR, VEGFR-3 (flt-4), VEGI, VFM, Viral antigens, VLA, VLA-1, VLA-4, VNR integrin, von Willebrands factor, WIF-1, WNT1, WNT2, WNT2B/13, WNT3, WNT3A, WNT4, WNT5A, WNT5B, WNT6, WNT7A, WNT7B, WNT8A, WNT8B, WNT9A, WNT9A, WNT9B, WNT10A, WNT10B, WNT11, WNT16, XCL1, XCL2, XCR1, XCR1, XEDAR, X1AP, XPD, CTLA4 (cytotoxic T lymphocyte antigen-4), PD1 (programmed cell death protein 1), PD-L1 (programmed cell death ligand 1), LAG-3 (lymphocyte activation gene-3), TIM-3 (T cell immunoglobulin and mucin protein-3), hormone receptors and growth factors.

[0072] In some embodiments, the disclosure provides an anti-CD3 antibody or antigen-binding fragment described herein, wherein said antibody or antigen-binding fragment may comprise at least a second antigen-binding domain that specifically binds to an antigen selected from the group consisting of: BCMA, CTLA4 (cytotoxic T lymphocyte antigen-4), PD1 (programmed cell death protein 1), PD-L1 (programmed cell death ligand 1), LAG-3 (lymphocyte activation gene-3), TIM-3, CD20, CD2, CD19, Her2, EGFR, EpCAM, FcyRIIIa (CD16), FcyRIIa (CD32a), FcyRIIb (CD32b), FcyRI (CD64), Toll-like receptors (TLRs), TLR4, TLR9, cytokines, IL-2, IL-5, IL-13, IL-6, IL-17, IL-12, IL-23, TNFa, TGFb, cytokine receptors, IL-2R, chemokines, chemokine receptors, growth factors, VEGF, and HGF.

[0073] In some embodiments, the disclosure provides an anti-CD3 antibody or antigen-binding fragment described herein, wherein said antibody or antigen-binding fragment may be comprised in a chimeric antigen receptor (CAR), which optionally may comprise at least one transmembrane domain, and at least one intracellular domain from a T-cell receptor, optionally a CD3ζ subunit, and at least one co-stimulatory domain.

[0074] In some embodiments, the disclosure provides an anti-CD3 antibody or antigen-binding fragment described herein, wherein said antibody or antigen-binding fragment may comprise an scFv2-Fc2 and/or scFv-IgG.

[0075] In some embodiments, the disclosure provides an anti-CD3 antibody or antigen-binding fragment described herein, wherein said antibody or antigen-binding fragment may comprise an IgG constant domain.

[0076] In some embodiments, the disclosure provides an anti-CD3 antibody or antigen-binding fragment described herein, wherein said antibody or antigen-binding fragment may comprise at least a second antigen-binding domain that specifically binds to an antigen, wherein said antibody comprises a multispecific format selected from the group consisting of Fab-Fc-scFv, “bottle-opener”, Mab-scFv, Mab-Fv, Dual scFv, central Fv, central scFv, one-arm central scFv, Fab-Fab, Fab-Fv, mAb-Fv, mAb-Fab, DART, BiTE, common light chain-IgG, TandAb, Cross-Mab, SEED, BEAT, TrioMab, and DuetMab.

[0077] In some embodiments, the disclosure provides an isolated or recombinant nucleic acid sequence encoding an anti-CD3 antibody or antigen-binding fragment described herein.

[0078] In some embodiments, the disclosure provides an expression vector comprising an isolated or recombinant nucleic acid sequence encoding an anti-CD3 antibody or antigen-binding fragment described herein.

[0079] In some embodiments, the disclosure provides a host cell transfected, transformed, or transduced with a nucleic acid sequence encoding an anti-CD3 antibody or antigen-binding fragment described herein, or an expression vector comprising an isolated or recombinant nucleic acid sequence encoding an anti-CD3 antibody or antigen-binding fragment described herein, wherein the host cell may optionally be a mammalian cell or a yeast cell.

[0080] In some embodiments, the disclosure provides a pharmaceutical composition comprising an antibody or antigen-binding fragment described herein or a host cell described herein, and a pharmaceutically acceptable carrier and/or excipient.

[0081] In some embodiments, the disclosure provides a method of treating a disorder in a mammal in need of such treatment, wherein the disorder may comprise a proliferative disorder, an oncological disorder, an immuno-oncological disorder, a neurological disorder, a neurodegenerative disorder, or an autoimmune disorder, and wherein the method may comprise administering an effective amount of at least one antibody or antigen-binding fragment described herein or a host cell which expresses at least one of said antibody or antigen-binding fragment described herein, optionally an immune cell, further optionally a T or NK cell. In some embodiments, the method may further comprise administering to the mammal an additional therapeutic agent, optionally wherein the mammal is a human.

[0082] In other embodiments, the disclosure provides an anti-CD3 antibody or antigen-binding fragment thereof comprising one or more of a CDRL1, a CDRL2, and a CDRL3. Such an antibody, in some embodiments, further comprises a CDRH1, a CDRH2, and a CDRH3.

### BRIEF DESCRIPTION OF THE DRAWING

[0083] FIG. 1A and FIG. 1B show pre-saturation methods 1 and 2. FIG. 1A: CD3 Pre-saturation Method #1: yeast cells were pre-saturated with native (un-biotinylated) CD3 antigen at pH 7.4 for 10 minutes, and yeast cells were washed at pH 7.4 and incubated in pH 6.0 media for 10 minutes to allow dissociation of antigen. Control cells were washed and incubated at pH 7.4. Lastly, yeast cells were incubated with biotinylated CD3 antigen (shown as a starred green circle) at pH 6 for 10 minutes. Control cells were incubated with biotinylated CD3 antigen at pH 7.4. Binders labeled at pH 6 were then sorted and characterized. FIG. 1B: CD3 Pre-saturation Method #2: yeast cells were pre-saturated with native CD3 antigen at pH 6.0 for 10 minutes and washed at pH 6.0 and incubated at either pH 7.4 or pH 6.0 for 10 minutes. Lastly, yeast cells were incubated with biotinylated CD3 antigen at the opposite pH (cells incubated at pH 6.0 in the previous step were incubated at pH 7.4, whereas cells incubated at pH 7.4 in the previous step were incubated at pH 6.0) for 10 minutes. Binders labeled with biotinylated CD3 antigen were then sorted and characterized.

[0084] FIG. 2 shows exemplary FACS plots from Round 1 and Round 2 selections from one library. Similar binding profiles were observed for all libraries. Briefly, during Round 1 cells were positively sorted using 100 nM human CD3εδ heterodimer (HuCD3-hd) at pH 6. During Round 2, cells were positively sorted using 100 nM HuCD3-hd at pH 6.0, negatively sorted using 100 nM HuCD3-hd at pH 7.4, or pre-saturated using Method #2 described above. Binding was also confirmed for cynomolgus CD3 (CyCD3-hd) at pH 6.0. Arrows indicate sorted cells that were carried forward to the next round of sorting.

[0085] FIG. 3 shows exemplary FACS plots from Round 3 and compares inputs of pH 6.0-positive sort and pH 7.4-negative sort from Round 2. Briefly, the sorts from Round 2 were incubated with 100 nM HuCD3-hd at pH 6.0 and 7.4. The Overlay column shows that the input cell population (from Round 2 sorts) exhibits higher binding at pH 6.0 compared to pH 7.4. The pre-saturation/toggle Method #2 was used to carry forward cells into the next rounds of selections.

[0086] FIG. 4 shows exemplary FACS plots from Round 4 and Round 5. Round 4 compared cells incubated in 100 nM HuCD3-hd at pH 6 and pH 7.4. Round 4 also compared cells subjected to the pre-saturation/toggling method at pH 6 and pH 7.4. Round 5 compared cells incubated in either 100 nM HuCD3-hd or 100 nM CyCD3-hd at pH 6 (red) and pH 7.4 (grey).

[0087] FIG. 5A and FIG. 5B show HuCD3 binding response. FIG. 5A shows HuCD3 binding response at pH 6 (x-axis) compared to HuCD3 binding response at pH 7.4 (y-axis) for 236 unique clones from Round 2/3 sort outputs. FIG. 5B shows K_{D} values for HuCD3 at pH 6 (x-axis) compared to HuCD3 at pH 7.4 (y-axis) for the 236 unique clones from Round 2/3 sort outputs. Blue circles represent the Round 2/3 clones obtained via the pH 6.0 pre-saturation/toggle sort, yellow circles represent the Round 2/3 clones obtained via the pH 7.4 negative sort, and the red circles represent the parent clone ADI-26906. Results show that the pH 7.4 negative sorts at Round 2/3 tends to yield more pH selected binders but with weaker pH 6.0 response or affinity, designated as Group 2 binders. Positive selections at pH 6.0 and the pre-saturation/toggle sort yielded clones with a mix of selectivity but with higher response/affinity. Such clones with higher affinity at pH 6.0 (e.g., K_{D}<˜25 nM) are designated as Group 1 binders.

[0088] FIG. 6 provides exemplary kinetics from the ForteBio experiments for four clones compared to parent clone ADI-26906. The K_{D} for each clone was calculated at pH 7.4 and pH 6.0. A ratio K_{D} was obtained by dividing the K_{D} at pH 7.4 by the K_{D} at pH 6.0. The examples demonstrate that some clones which are designated as Group 1 binders, such as SAD10318_P02_A05 (ADI-48595) and SAD10318_P02_C04 (ADI-48592), bound stronger (with a lower K_{D}) at pH 6.0 compared to pH 7.4. Some clones which are designated as Group 2 binders, such as SAD10318_P01_A03 (ADI-48587) and SAD10318_P01_E01 (ADI-48577), were non-binders at pH 7.4 but bound at pH 6.0. Amino acid substitutions in the CDRH3, CDRL1, and CDRL3 regions that may contribute to the differential binding are highlighted the Sequence column of FIG. 6 (SEQ ID NOS 576-590, respectively, in order of appearance). Clones such as ADI-48576, ADI-48577, ADI-48587, ADI-48592, ADI-48595, ADI-48635, ADI-48650, ADI-48652, ADI-48666, ADI-48643, and ADI-48645 exhibit pH-dependent binding (with stronger binding at pH 6.0 relative to binding at pH 7.4), low PSR scores, and provide a range of affinities for CD3.

### DETAILED DESCRIPTION OF THE INVENTION

[0089] Unless defined otherwise, all technical and scientific terms used herein have the same meaning as commonly understood by one of ordinary skill in the art to which this disclosure belongs. As used herein, the term “about,” when used in reference to a particular recited numerical value, means that the value may vary from the recited value by no more than 1%. For example, as used herein, the expression “about 100” includes 99 and 101 and all values in between (e.g., 99.1, 99.2, 99.3, 99.4, etc.).

[0090] It is understood that aspects and embodiments of the disclosure described herein include “comprising,” “consisting,” and “consisting essentially of” aspects and embodiments.

[0091] Provided herein are anti-CD3 antibodies and antigen-binding fragments thereof that exhibit pH-dependent binding and favorable developability profiles.

[0092] “Cluster of Differentiation 3” or “CD3”, generally refers to any native CD3 from any vertebrate source, including mammals such as primates (e.g., humans) and rodents (e.g., mice and rats), unless otherwise indicated, including, for example, CD3ε, CD3γ, CD3α, and CD3β chains. The term encompasses “full-length,” unprocessed CD3 (e.g., unprocessed or unmodified CD3ε or CD3γ), as well as any form of CD3 that results from processing in the cell. The term also encompasses naturally occurring variants of CD3, including, for example, splice variants or allelic variants. CD3 includes, for example, human CD3ε protein (NCBI RefSeq No. NP_000724), which is 207 amino acids in length, and human CD3γ protein (NCBI RefSeq No. NP_000064), which is 182 amino acids in length. The term also refers to either the human or cynomolgus CD3epsilon protein, SEQ ID NOs: 591 and 592, respectively, (Table 4). “CD3εN27” and “CD3εN13” refer to the N-terminal 27 amino acids and the N-terminal 13 amino acids, respectively, of CD3, and optionally containing chemical modifications or conjugations made thereto.

[0093] An “anti-CD3 antibody” refers to an antibody or an antigen-binding fragment thereof capable of binding to CD3, e.g., CD3ε and/or CD3γ, e.g., human CD3ε and/or CD3γ with sufficient affinity and/or specificity such that the antibody is useful as a diagnostic and/or therapeutic agent in targeting CD3. In some embodiments, an anti-CD3 antibody binds to CD3 with a dissociation constant (K_{D}) of about 100×10⁻⁹ M or less, about 50×10⁻⁹ M or less, about 25×10⁻⁹ M or less, about 20×10⁻⁹ M or less, or about 10×10⁻⁹ M or less. In some embodiments, an anti-CD3 antibody binds to CD3 with a dissociation constant (K_{D}) of about 5×10⁻⁹ M or less. In some embodiments, an anti-CD3 antibody binds to CD3 with a dissociation constant (K_{D}) of about 2.5×10⁻⁹ M or less. In some embodiments, an anti-CD3 antibody binds to CD3 with a dissociation constant (K_{D}) of about 1×10⁻¹⁰ M or less. In some embodiments, K_{D} is measured by surface plasmon resonance, e.g., BIACORE, biolayer interferometry measurements using, e.g., a FORTEBIO Octet HTX instrument (Pall Life Sciences), or solution-affinity ELISA. In some embodiments, the K_{D} is measured using an scFv fragment of the anti-CD3 antibody. In some embodiments, the monovalent K_{D} is measured. In some embodiments, the anti-CD3 antibody binds to an epitope of CD3 that is conserved among CD3 from different species, e.g., human and cyno cross-reactive.

[0094] The term “engineered pH-dependent” refers to an antibody having a modified amino acid sequence that allows for preferential or selective antigen binding at a certain pH. For example, a parent antibody can be engineered (e.g., by modifying the amino acid sequence) for pH-dependent binding. pH-dependent binding refers to an antibody's preference to bind an antigen at a given pH (or given pH range) as compared to a different pH (or pH range). In one embodiment, pH-dependent antibodies preferentially or selectively bind to an antigen at a pH at around 6 as compared to a pH at around 7. An antibody sequence may be modified by, for example, substitution with one or more ionizable amino acid residues such as histidine, lysine, arginine, aspartic acid, and glutamic acid. Ionizable residues may be substituted into CDRs and/or the FRs. In some embodiments, 1-10 substitutions may be present per variant VH or VK. In some embodiments, 1-6 substitutions may be present per variant VH or VK.

[0095] The term “cytokine release syndrome” (or “CRS”) refers to a pro-inflammatory, positive feedback loop between cytokines and immune cells leading to excessive or uncontrolled release of pro-inflammatory cytokines by cells within the immune system (see, e.g., Lee et al., Blood, Vol. 124, pages 188-195 (2014) and Tisoncik et al., Microbiol Mol Biol Rev, Vol. 76, pages 16-32 (2012). Upon stimulation and activation, T cells release a series of cytokines to a level and degree that generates untoward biological/physiological effects or varying degree and severity, including acute inflammation characterized by, e.g., rubor (redness), swelling or edema, calor (heat), dolor (pain), and “functio laesa” (loss of function). When localized in skin or other tissue, biological/physiological effects comprise increased blood flow, enabling vascular leukocytes and plasma proteins to reach extravascular sites of injury, increasing local temperatures and generation of pain, tissue edema and extravascular pressure and a reduction in tissue perfusion. Other biological/physiological effects comprise organ and system dysfunction, such as cardiac dysfunction, adult respiratory distress syndrome, neurologic toxicity, renal and/or hepatic failure, and disseminated intravascular coagulation. Elevated levels of IFNγ, IL-6, TNFα, TGFbeta, IL-2, granulocyte macrophage-colony-stimulating factor (GM-CSF), IL-10, IL-8, IL-5, and/or fractalkine are implicated as predictive and/or causative of CRS or the propensity to elicit CRS upon T-cell stimulation.

[0096] In certain embodiments, the anti-CD3 antibodies and/or antigen-binding fragments thereof described herein are detuned and/or modified to reduce the likelihood or severity of CRS induced by the antibody. Non-limiting exemplary modifications may include silent Fc regions (e.g., removing the Fc completely or modifying the Fc region to reduce or eliminate effector function), and/or masking (e.g., a polypeptide mask that is positioned such that it reduces or inhibits the ability of the antibody or antigen-binding fragment thereof to specifically bind CD3).

[0097] The term “antibody” is used herein in the broadest sense and encompasses various antibody structures, including but not limited to monoclonal antibodies, polyclonal antibodies, multispecific antibodies (e.g., bispecific antibodies), and/or antibody fragments (preferably those fragments that exhibit the desired antigen-binding activity).

[0098] A “monoclonal antibody” or “mAb” refers to an antibody obtained from a population of substantially homogeneous antibodies, i.e., the individual antibodies comprising the population are identical and/or bind the same epitope, except for possible variant antibodies (e.g., containing naturally occurring mutations or arising during production of a monoclonal antibody preparation), such variants generally being present in minor amounts. In contrast to polyclonal antibody preparations, which typically include different antibodies directed against different determinants (epitopes), each monoclonal antibody of a monoclonal antibody preparation is directed against a single determinant on an antigen.

[0099] With regard to multispecific antibodies, such antibodies comprise at least two different antigen binding domains which recognize and specifically bind to at least two different antigens. With regard to bispecific antibodies, such antibodies comprise two different antigen binding domains which recognize and specifically bind to at least two different antigens.

[0100] A “different antigen” may refer to different and/or distinct proteins, polypeptides, or molecules; as well as different and/or distinct epitopes, which epitopes may be contained within one protein, polypeptide, or other molecule.

[0101] The term “epitope” refers to an antigenic determinant that interacts with a specific antigen binding site in the variable region of an antibody molecule known as a paratope. A single antigen may have more than one epitope. Thus, different antibodies may bind to different areas on an antigen and may have different biological effects. The term “epitope” also refers to a site on an antigen to which B and/or T cells respond. It also refers to a region of an antigen that is bound by an antibody. Epitopes may be defined as structural or functional. Functional epitopes are generally a subset of the structural epitopes and have those residues that directly contribute to the affinity of the interaction. Epitopes may also be conformational, that is, composed of non-linear amino acids. In certain embodiments, epitopes may include determinants that are chemically active surface groupings of molecules such as amino acids, sugar side chains, phosphoryl groups, or sulfonyl groups, and, in certain embodiments, may have specific three-dimensional structural characteristics, and/or specific charge characteristics.

[0102] In some instances, an antibody comprises four polypeptide chains: two heavy (H) chains and two light (L) chains interconnected by disulfide bonds. There are five major classes of antibodies: IgA, IgD, IgE, IgG, and IgM, and several of these may be further divided into subclasses (isotypes), e.g., IgG1, IgG2, IgG3, IgG4, IgA1, and IgA2. The heavy chain constant domains that correspond to the different classes of immunoglobulins are called α, δ, ε, γ, and μ, respectively.

[0103] In other instances, an antibody may instead comprise multimers thereof (e.g., IgM) or antigen-binding fragments thereof. Each heavy chain is comprised of a heavy chain variable region (“VH”) and a heavy chain constant region (“CH”), which is comprised of domains CH1, CH2 and CH3. Each light chain is comprised of a light chain variable region (“VL”) and a light chain constant region (“CL”). The VH and VL regions can be further subdivided into regions of hypervariability, termed complementarity determining regions (CDRs), interspersed with regions that are more conserved, termed framework regions (FRs). Each VH and VL is composed of three CDRs and four FRs, arranged from amino-terminus to carboxy-terminus in the following order: FR1, CDR1, FR2, CDR2, FR3, CDR3, FR4. In certain embodiments of the disclosure, the FRs of the antibody (or antigen-binding fragment thereof) may be identical to the human germline sequences or may be naturally or artificially modified. An amino acid consensus sequence may be defined based on a side-by-side analysis of two or more CDRs. Accordingly, the CDRs in a heavy chain are designated “CDRH1”, “CDRH2”, and “CDRH3”, respectively, and the CDRs in a light chain are designated “CDRL1”, “CDRL2”, and “CDRL3”.

[0104] Unless specifically indicated otherwise, the term “antibody” as used herein encompasses molecules comprising two immunoglobulin heavy chains and two immunoglobulin light chains (i.e., “full-length antibody” or “intact antibodies” or “whole antibody”) as well as antigen-binding fragments thereof.

[0105] An “antigen-binding fragment” refers to a portion of an intact antibody that binds the antigen to which the intact antibody binds (in this case, CD3). The terms “full-length antibody,” “intact antibody,” and “whole antibody” or the like are used herein interchangeably and refer to an antibody having a structure substantially similar to a native antibody.

[0106] An antigen-binding fragment of an antibody includes any naturally occurring, enzymatically obtainable, synthetic, or genetically engineered polypeptide or glycoprotein that specifically binds an antigen to form a complex, including an antibody fragment. Exemplary antigen-binding fragments include, but are not limited to, Fv, Fab, Fab′, Fab′-SH, F(ab′)₂; diabodies; linear antibodies; single-chain antibody molecules (e.g. scFv or VH or VL domains only); and multispecific antibodies formed from antibody fragments. In some embodiments, the antigen-binding fragments of the anti-CD3 antibodies described herein are scFvs.

[0107] As with full antibody molecules, antigen-binding fragments may be mono-specific or multispecific (e.g., bispecific). A multi-specific antigen-binding fragment of an antibody may comprise at least two different variable domains, wherein each variable domain is capable of specifically binding to a separate antigen or to a different epitope on the same antigen. A variety of multi-specific antibody formats may be used in the context of an antigen-binding fragment of anti-CD3 antibody described herein. Non-limiting examples of multispecific and bispecific formats include, e.g., Fab-Fc-scFv (“bottle-opener”) (XENCOR), Mab-scFv (XENCOR), Mab-Fv (XENCOR), Dual scFv (XENCOR), central Fv (XENCOR), central scFv(XENCOR), one-arm central scFv (XENCOR), Fab-Fab (XENCOR), Fab-Fv (XENCOR), mAb-Fv (XENCOR), mAb-Fab (XENCOR), DART (MACROGENICS), BiTE (AMGEN/MICROMET), KiTE, common light chain-IgG (Genentech), TandAb (SFFIMED) Cross-Mab (ROCHE), SEED (EMD SERONO), BEAT (GLENMARK), TrioMab (TRION PHARMA/FRESENIUS BIOTECH), DuetMab (MEDIMMUNE), and others, as disclosed, e.g., in (WO 95/09917; WO 2008/119566; WO 2008/119567; WO2011/121110; WO 2010/037835; WO 2007/042261; WO 2007/110205; WO 2011/121110; WO 2012/055961; WO 2012/16067; WO 2016/086189; WO 2016/182751; WO 2015/006749; WO 2014/049003; WO 2013/177101; WO 2015/128509; U.S. Pat. No. 7,951,917; US 2009/0252729; US 2014/0348839; U.S. Pat. No. 7,183,076; Mazor et al., Mabs, Vol. 7, pages 377-389 (2015); Muda et al., Protein Engineering, Design, & Selection, Vol. 24, pages 447-454 (2011); and Del Bano et al., Antibodies, Vol. 5, pages 1-23 (2016). In some embodiments, the anti-CD3 scFv fragments described herein comprise one or more variable domains of a multispecific (e.g., bispecific), antibody.

[0108] In certain embodiments, the anti-CD3 antibodies and/or antigen-binding fragments thereof as described herein are contained in a multispecific antibody, in particular, a bispecific antibody that has binding specificity for a second antigen. Such a second antigen may be a different target altogether than the first target, or a different epitope present on the same target. In some embodiments, the binding specifities are to two different epitopes of CD3 (e.g., CD3ε or CD3γ). In other embodiments, one of the binding specificities is for CD3 (e.g., CD3ε or CD3γ) and the other is for a different biological molecule (e.g., a cell surface antigen, e.g., a tumor antigen).

[0109] Non-limiting examples of a second antigen toward which a bispecific antibody comprising anti-CD3 antibodies and/or antigen-binding fragments thereof as described herein, comprises targets selected from the group consisting of: 17-IA, 4-1BB, 4Dc, 6-keto-PGF1a, 8-iso-PGF2a, 8-oxo-dG, A1 Adenosine Receptor, A33, ACE, ACE-2, Activin, Activin A, Activin AB, Activin B, Activin C, Activin RIA, Activin RIA ALK-2, Activin RIB ALK-4, Activin RIIA, Activin RUB, ADAM, ADAM10, ADAM12, ADAM15, ADAM17/TACE, ADAM8, ADAM9, ADAMTS, ADAMTS4, ADAMTS5, Addressins, aFGF, ALCAM, ALK, ALK-1, ALK-7, alpha-1-antitrypsin, alpha-V/beta-1 antagonist, ANG, Ang, APAF-1, APE, APJ, APP, APRIL, AR, ARC, ART, Artemin, anti-Id, ASPARTIC, Atrial natriuretic factor, av/b3 integrin, Axl, b2M, B7-1, B7-2, B7-H, B-lymphocyte Stimulator (BlyS), BACE, BACE-1, Bad, BAFF, BAFF-R, Bag-1, BAK, Bax, BCA-1, BCAM, Bel, BCMA, BDNF, b-ECGF, bFGF, BID, Bik, BIM, BLC, BL-CAM, BLK, BMP, BMP-2 BMP-2a, BMP-3 Osteogenin, BMP-4 BMP-2b, BMP-5, BMP-6 Vgr-1, BMP-7 (OP-1), BMP-8 (BMP-8a, OP-2), BMPR, BMPR-IA (ALK-3), BMPR-IB (ALK-6), BRK-2, RPK-1, BMPR-II (BRK-3), BMPs, b-NGF, BOK, Bombesin, Bone-derived neurotrophic factor, BPDE, BPDE-DNA, BTC, complement factor 3 (C3), C3a, C4, C5, C5a, CIO, CA125, CAD-8, Calcitonin, cAMP, carcinoembryonic antigen (CEA), carcinoma-associated antigen, Cathepsin A, Cathepsin B, Cathepsin C/DPPI, Cathepsin D, Cathepsin E, Cathepsin H, Cathepsin L, Cathepsin O, Cathepsin S, Cathepsin V, Cathepsin X/Z/P, CBL, CCI, CCK2, CCL, CCL1, CCL11, CCL12, CCL13, CCL 14, CCL15, CCL16, CCL17, CCL18, CCL19, CCL2, CCL20, CCL21, CCL22, CCL23, CCL24, CCL25, CCL26, CCL27, CCL28, CCL3, CCL4, CCL5, CCL6, CCL7, CCL8, CCL9/10, CCR, CCR1, CCR10, CCR10, CCR2, CCR3, CCR4, CCR5, CCR6, CCR7, CCR8, CCR9, CD1, CD2, CD4, CD5, CD6, CD7, CD8, CD10, CD11a, CD11b, CD11c, CD13, CD14, CD15, CD16, CD18, CD19, CD20, CD21, CD22, CD23, CD25, CD27L, CD28, CD29, CD30, CD30L, CD32, CD33 (p67 proteins), CD34, CD38, CD40, CD40L, CD44, CD45, CD46, CD49a, CD52, CD54, CD55, CD56, CD61, CD64, CD66e, CD74, CD80 (B7-1), CD89, CD95, CD123, CD137, CD138, CD140a, CD146, CD147, CD148, CD152, CD164, CEACAM5, CFTR, cGMP, CINC, Clostridium botulinum toxin, Clostridium perfringens toxin, CKb8-1, CLC, CMV, CMV UL, CNTF, CNTN-1, COX, C-Ret, CRG-2, CT-1, CTACK, CTGF, CTLA-4, CX3CL1, CX3CR1, CXCL, CXCL1, CXCL2, CXCL3, CXCL4, CXCL5, CXCL6, CXCL7, CXCL8, CXCL9, CXCL10, CXCL11, CXCL12, CXCL13, CXCL14, CXCL15, CXCL16, CXCR, CXCR1, CXCR2, CXCR3, CXCR4, CXCR5, CXCR6, cytokeratin tumor-associated antigen, DAN, DCC, DcR3, DC-SIGN, Decay accelerating factor, des(1-3)-IGF-I (brain IGF-1), Dhh, digoxin, DNAM-1, Dnase, Dpp, DPPIV/CD26, Dtk, ECAD, EDA, EDA-A1, EDA-A2, EDAR, EGF, EGFR (ErbB-1), EMA, EMMPRIN, EN A, endothelin receptor, Enkephalinase, eNOS, Eot, eotaxin1, EpCAM, Ephrin B2/EphB4, EPO, ERCC, E-selectin, ET-1, Factor IIa, Factor VII, Factor VIIIc, Factor IX, fibroblast activation protein (FAP), Fas, FcR1, FEN-1, Ferritin, FGF, FGF-19, FGF-2, FGF3, FGF-8, FGFR, FGFR-3, Fibrin, FL, FLIP, Flt-3, Flt-4, Follicle stimulating hormone, Fractalkine, FZD1, FZD2, FZD3, FZD4, FZD5, FZD6, FZD7, FZD8, FZD9, FZD10, G250, Gas 6, GCP-2, GCSF, GD2, GD3, GDF, GDF-1, GDF-3 (Vgr-2), GDF-5 (BMP-14, CDMP-1), GDF-6 (BMP-13, CDMP-2), GDF-7 (BMP-12, CDMP-3), GDF-8 (Myostatin), GDF-9, GDF-15 (MIC-1), GDNF, GDNF, GFAP, GFRa-1, GFR-alpha1, GFR-alpha2, GFR-alpha3, GITR, Glucagon, Glut 4, glycoprotein IIb/IIa (GP IIb/IIIa), GM-CSF, gp130, gp72, GRO, Growth hormone releasing factor, Hapten (NP-cap or NIP-cap), HB-EGF, HCC, HCMV gB envelope glycoprotein, HCMV) gH envelope glycoprotein, HCMV UL, Hemopoietic growth factor (HGF), Hep B gp120, heparanase, Her2, Her2/neu (ErbB-2), Her3 (ErbB-3), Her4 (ErbB-4), herpes simplex virus (HSV) gB glycoprotein, HSV gD glycoprotein, HGFA, High molecular weight melanoma-associated antigen (HMW-MAA), HIV gp120, HIV 111B gp 120 V3 loop, HLA, HLA-DR, HM1.24, HMFG PEM, HRG, Hrk, human cardiac myosin, human cytomegalovirus (HCMV), human growth hormone (HGH), HVEM, 1-309, IAP, ICAM, ICAM-1, ICAM-3, ICE, ICOS, IFNg, Ig, IgA receptor, IgE, IGF, IGF binding proteins, IGF-1R, IGFBP, IGF-I, IGF-II, IL, IL-1, IL-1R, IL-2, IL-2R, IL-4, IL-4R, IL-5, IL-5R, IL-6, IL-6R, IL-8, IL-9, IL-10, IL-12, IL-13, IL-15, IL-18, IL-18R, IL-23, interferon (INF)-alpha, INF-beta, INF-gamma, Inhibin, iNOS, Insulin A-chain, Insulin B-chain, Insulin-like growth factor 1, integrin alpha2, integrin alpha3, integrin alpha4, integrin alpha4/beta1, integrin, alpha4/beta7, integrin alpha5 (alphaV), integrin alpha5/beta1, integrin alpha5/beta3, integrin alpha6, integrin beta1, integrin beta2, interferon gamma, IP-10, 1-TAC, JE, Kallikrein 2, Kallikrein 5, Kallikrein 6, Kallikrein 11, Kallikrein 12, Kallikrein 14, Kallikrein 15, Kallikrein L1, Kallikrein L2, Kallikrein L3, Kallikrein L4, KC, KDR, Keratinocyte Growth Factor (KGF), laminin 5, LAMP, LAP, LAP (TGF-1), Latent TGF-1, Latent TGF-1 bpl, LBP, LDGF, LECT2, Lefty, Lewis-Y antigen, Lewis-Y related antigen, LFA-1, LFA-3, Lfo, LIF, LIGHT, lipoproteins, LIX, LKN, Lptn, L-Selectin, LT-a, LT-b, LTB4, LTBP-1, Lung surfactant, Luteinizing hormone, Lymphotoxin Beta Receptor, Mac-1, MAdCAM, MAG, MAP2, MARC, MCAM, MCAM, MCK-2, MCP, M-CSF, MDC, Mer, METALLOPROTEASES, MGDF receptor, MGMT, MHC (HLA-DR), MIF, MIG, MIP, MIP-1-alpha, MK, MMAC1, MMP, MMP-1, MMP-10, MMP-11, MMP-12, MMP-13, MMP-14, MMP-15, MMP-2, MMP-24, MMP-3, MMP-7, MMP-8, MMP-9, MPIF, Mpo, MSK, MSP, mucin (Muc1), MUC18, Muellerian-inhibitin substance, Mug, MuSK, NAIP, NAP, NCAD, N-Cadherin, NCA 90, NCAM, NCAM, Neprilysin, Neurotrophin-3, -4, or -6, Neurturin, Neuronal growth factor (NGF), NGFR, NGF-beta, nNOS, NO, NOS, Npn, NRG-3, NT, NTN, OB, OGG1, OPG, OPN, OSM, OX40L, OX40R, p150, p95, PADPr, Parathyroid hormone, PARC, PARP, PBR, PBSF, PCAD, P-Cadherin, PCNA, PDGF, PDGF, PDK-1, PECAM, PEM, PF4, PGE, PGF, PGJ2, PGJ2, PIN, PLA2, placental alkaline phosphatase (PLAP), P1GF, PLP, PP14, Proinsulin, Prorelaxin, Protein C, PS, PSA, PSCA, prostate specific membrane antigen (PSMA), PTEN, PTHrp, Ptk, PTN, R51, RANK, RANKL, RANTES, RANTES, Relaxin A-chain, Relaxin B-chain, renin, respiratory syncytial virus (RSV) F, RSV Fgp, Ret, Rheumatoid factors, RLIP76, RPA2, RSK, S100, SCF/KL, SDF-1, SERINE, Serum albumin, sFRP-3, Shh, SIGIRR, SK-1, SLAM, SLPI, SMAC, SMDF, SMOH, SOD, SPARC, Stat, STEAP, STEAP-TT, TACE, TACT, TAG-72 (tumor-associated glycoprotein-72), TARC, TCA-3, T-cell receptors (e.g., T-cell receptor alpha/beta), TdT, TECK, TEM1, TEM5, TEM7, TEM8, TERT, testicular PLAP-like alkaline phosphatase, TfR, TGF, TGF-alpha, TGF-beta, TGF-beta Pan Specific, TGF-beta RI (ALK-5), TGF-beta RII, TGF-beta RIIb, TGF-beta RIII, TGF-beta1, TGF-beta2, TGF-beta3, TGF-beta4, TGF-beta5, Thrombin, Thymus Ck-1, Thyroid stimulating hormone, Tie, TIMP, TIQ, Tissue Factor, TMEFF2, Tmpo, TMPRSS2, TNF, TNF-alpha, TNF-alpha beta, TNF-beta2, TNFc, TNF-RI, TNF-RII, TNFRSF10A (TRAIL R1 Apo-2, DR4), TNFRSFIOB (TRAIL R2 DR5, KILLER, TRICK-2A, TRICK-B), TNFRSF10C (TRAIL R3 DcR1, LIT, TRID), TNFRSF10D (TRAIL R4 DcR2, TRUNDD), TNFRSF11A (RANK ODF R, TRANCE R), TNFRSF11B (OPG OC1F, TR1), TNFRSF12 (TWEAK R FN14), TNFRSF13B (TACI), TNFRSF13C (BAFF R), TNFRSF14 (HVEM ATAR, HveA, LIGHT R, TR2), TNFRSF16 (NGFR p75NTR), TNFRSF17 (BCMA), TNFRSF18 (GITR AITR), TNFRSF19 (TROY TAJ, TRADE), TNFRSF19L (RELT), TNFRSFIA (TNF RI CD120a, p55-60), TNFRSFIB (TNF RII CD120b, p75-80), TNFRSF26 (TNFRH3), TNFRSF3 (LTbR TNF RIII, TNFC R), TNFRSF4 (OX40 ACT35, TXGP1 R), TNFRSF5 (CD40 p50), TNFRSF6 (Fas Apo-1, APT1, CD95), TNFRSF6B (DcR3 M68, TR6), TNFRSF7 (CD27), TNFRSF8 (CD30), TNFRSF9 (4-1BB CD137, ILA), TNFRSF21 (DR6), TNFRSF22 (DcTRAIL R2 TNFRH2), TNFRST23 (DcTRAIL R1 TNFRH1), TNFRSF25 (DR3 Apo-3, LARD, TR-3, TRAMP, WSL-1), TNFSF10 (TRAIL Apo-2 Ligand, TL2), TNFSF11 (TRANCE/RANK Ligand ODF, OPG Ligand), TNFSF12 (TWEAK Apo-3 Ligand, DR3 Ligand), TNFSF13 (APRIL TALL2), TNFSF13B (BAFF BLYS, TALL1, THANK, TNFSF20), TNFSF14 (LIGHT HVEM Ligand, LTg), TNFSF15 (TLIA/VEGI), TNFSF18 (GITR Ligand AITR Ligand, TL6), TNFSFIA (TNF-α Conectin, DIF, TNFSF2), TNFSF1B (TNF-b LTa, TNFSF1), TNFSF3 (LTb TNFC, p33), TNFSF4 (OX40 Ligand gp34, TXGP1), TNFSF5 (CD40 Ligand CD154, gp39, HIGM1, IMD3, TRAP), TNFSF6 (Fas Ligand Apo-1 Ligand, APT1 Ligand), TNFSF7 (CD27 Ligand CD70), TNFSF8 (CD30 Ligand CD153), TNFSF9 (4-1BB Ligand CD137 Ligand), TP-1, t-PA, Tpo, TRAIL, TRAIL R, TRAIL-R1, TRAIL-R2, TRANCE, transferring receptor, TRF, Trk, TROP-2, TSG, TSLP, tumor-associated antigen CA 125, tumor-associated antigen expressing Lewis Y related carbohydrate, TWEAK, TXB2, Ung, uPAR, uPAR-1, Urokinase, VCAM, VCAM-1, VECAD, VE-Cadherin, VE-cadherin-2, VEFGR-1 (fit-1), VEGF, VEGFR, VEGFR-3 (fit-4), VEGI, VIM, Viral antigens, VLA, VLA-1, VLA-4, VNR integrin, von Willebrands factor, WIF-1, WNT1, WNT2, WNT2B/13, WNT3, WNT3A, WNT4, WNT5A, WNT5B, WNT6, WNT7A, WNT7B, WNT8A, WNT8B, WNT9A, WNT9A, WNT9B, WNT10A, WNT10B, WNT11, WNT16, XCL1, XCL2, XCR1, XCR1, XEDAR, X1AP, XPD, CTLA4 (cytotoxic T lymphocyte antigen-4), PD1 (programmed cell death protein 1), PD-L1 (programmed cell death ligand 1), LAG-3 (lymphocyte activation gene-3), TIM-3 (T cell immunoglobulin and mucin protein-3), receptors for hormones, and growth factors.

[0110] Multispecifics comprising anti-CD3 antibodies and antigen-binding fragments disclosed herein may be prepared according to a variety of techniques including, but are not limited to, recombinant co-expression of two immunoglobulin heavy chain-light chain pairs having different specificities (see, Milstein and Cuello, Nature 305: 537 (1983)), WO 93/08829, and Traunecker et al., EMBO J 10: 3655 (1991)), “knob-in-hole” engineering (see, e.g., U.S. Pat. No. 5,731,168); immunoglobulin crossover (also known as Fab domain exchange or CrossMab format) technology (see, e.g., WO2009/080253; Schaefer et al., Proc. Natl. Acad. Sci. USA, 108:11187-11192 (2011)); engineering electrostatic steering effects for making antibody Fc-heterodimeric molecules (WO 2009/089004A1); cross-linking two or more antibodies or fragments (see, e.g., U.S. Pat. No. 4,676,980, and Brennan et al., Science, 229: 81 (1985)); leucine zippers (see, e.g., Kostelny et al., J. Immunol, 148(5):1547-1553 (1992)); “diabody” technology (see, e.g., Hollinger et al., Proc. Natl. Acad. Sci. USA, 90:6444-6448 (1993)); single-chain Fv (sFv) dimers (see, e.g. Gruber et al., J. Immunol, 152:5368 (1994)); and trispecific antibodies as described, e.g., in Tutt et al. J. Immunol 147: 60 (1991).

[0111] The present disclosure also contemplates modification of anti-CD3 antibodies disclosed herein, such modifications comprising one or more amino acid substitutions, insertions and/or deletions in the FR and/or CDR regions of the heavy and light chain variable domains. Once obtained, such derivative antibodies and/or antigen-binding fragments can be tested for one or more desired properties such as improved binding specificity, increased binding affinity, improved developability, etc.

[0112] In some embodiments, anti-CD3 antibodies and/or antigen-binding fragments thereof comprise a heavy chain (HC) sequence, light chain (LC) sequence, CDRH3 sequence, CDRH2 sequence, CDRH1 sequence, CDRL3 sequence, CDRL2 sequence, CDRL1 sequence, and/or framework sequence. In some embodiments, anti-CD3 antibodies and/or antigen-binding fragments thereof have amino acid sequence identity to corresponding sequences of anti-CD3 antibodies disclosed in Table 1 (Ab1-Ab258) by at least about 100%, at least about 99%, at least about 98%, at least about 97%, at least about 96%, at least about 95%, at least about 94%, at least about 93%, at least about 92%, at least about 91%, at least about 90%, at least about 89%, at least about 88%, at least about 87%, at least about 86%, at about 85%, at least about 84%, at least about 83%, at least about 82%, at least about 80%; and/or all percentages of identity in between. In some embodiments, percent identity is measured by any well-known algorithm of sequence identity, such as FASTA, BLAST or GAP.

[0113] In some embodiments, residue positions that are not identical differ by conservative amino acid substitutions. A “conservative amino acid substitution” is one in which an amino acid residue is substituted by another amino acid residue having a side chain (R group) with similar chemical properties (e.g., charge or hydrophobicity). In general, a conservative amino acid substitution will not substantially change the functional properties of a protein. In cases where two or more amino acid sequences differ from each other by conservative substitutions, the percent or degree of similarity may be adjusted upwards to correct for the conservative nature of the substitution. Means for making this adjustment are well known to those of skill in the art. (See, e.g., Pearson (1994) Methods Mol. Biol. 24: 307-331). Examples of groups of amino acids that have side chains with similar chemical properties include 1) aliphatic side chains: glycine, alanine, valine, leucine and isoleucine; 2) aliphatic-hydroxyl side chains: serine and threonine; 3) amide-containing side chains: asparagine and glutamine; 4) aromatic side chains: phenylalanine, tyrosine, and tryptophan; 5) basic side chains: lysine, arginine, and histidine; 6) acidic side chains: aspartate and glutamate, and 7) sulfur-containing side chains: cysteine and methionine. In some embodiments, conservative amino acids substitution groups are: valine-leucine-isoleucine, phenylalanine-tyrosine, lysine-arginine, alanine-valine, glutamate-aspartate, and asparagine-glutamine. Alternatively, in some embodiments, a conservative replacement comprises any change having a positive value in the PAM250 log-likelihood matrix disclosed in Gonnet et al. (1992) Science 256: 1443 45. In some embodiments, a “moderately conservative” replacement comprises any change having a nonnegative value in a PAM250 log-likelihood matrix.

[0114] Substitution of one or more CDR residues or omission of one or more CDRs is also possible. Antibodies have been described in which one or two CDRs can be dispensed to alter binding in the scientific literature. Padlan et al. (1995 FASEB J. 9:133-139) analyzed contact regions between antibodies and their antigens, based on published crystal structures, and concluded that only about one fifth to one third of CDR residues actually contact their associated antigen. Padlan also found many antibodies in which one or two CDRs had zero amino acids in contact with an antigen (see also, Vajdos et al. 2002 J Mol Biol 320:415-428). CDR residues not contacting an antigen can be identified based on previous studies (for example residues H60-H65 in CDRH2 are often not required), from regions of Kabat CDRs lying outside Chothia CDRs, by molecular modeling and/or empirically. If a CDR or residue(s) thereof is omitted, it is usually substituted with an amino acid occupying the corresponding position in another human antibody sequence or a consensus of such sequences. Positions for substitution within CDRs and amino acids to substitute can also be selected empirically.

[0115] In certain embodiments, substitutions, insertions, or deletions may occur within one or more CDRs of engineered pH-dependent CD3 binding antibodies described herein, so long as such alterations preserve pH sensitivity and do not substantially reduce the ability of the antibody to bind its antigen. For example, conservative alterations (e.g., conservative substitutions as provided herein) that do not substantially reduce binding affinity may be made in CDRs. Such alterations may, for example, be outside of antigen contacting residues in the CDRs. In certain embodiments of the variant VH and VL sequences provided above, each CDR either is unaltered, or contains no more than one, two or three amino acid substitutions.

[0116] A useful method for identification of residues or regions of an antibody that may be targeted for mutagenesis is called “alanine scanning mutagenesis” as described by Cunningham and Wells (1989) Science, 244:1081-1085. In this method, a residue or group of target residues (e.g., charged residues such as arg, asp, his, lys, and glu) are identified and replaced by a neutral or negatively charged amino acid (e.g., alanine or polyalanine) to determine whether the interaction of the antibody with antigen is affected. Further substitutions may be introduced at the amino acid locations demonstrating functional sensitivity to the initial substitutions. Alternatively, or additionally, a crystal structure of an antigen-antibody complex to identify contact points between the antibody and antigen. Such contact residues and neighboring residues may be targeted or eliminated as candidates for substitution. Variants may be screened to determine whether they contain the desired properties.

[0117] Amino acid sequence insertions include amino- and/or carboxyl-terminal fusions ranging in length from one residue to polypeptides containing a hundred or more residues, as well as intrasequence insertions of single or multiple amino acid residues. Examples of terminal insertions include an antibody with an N-terminal methionyl residue. Other insertional variants of an antibody molecule include fusion to the N- or C-terminus of the antibody to an enzyme (e.g. for ADEPT) or a polypeptide which increases serum half-life of the antibody.

[0118] As described throughout, anti-CD3 antibodies and/or antigen-binding fragments thereof as provided herein possess favorable developability and are, thus, relatively developable.

[0119] The term “developable” refers to the extent to which one or more polypeptides in a plurality of polypeptides possess desirable characteristics, such as, e.g., desirable expression, for example, in mammalian cells; solubility; viscosity; aggregation; chemical and/or physical stability; desirable shelf-life; melting temperature; pharmacokinetic profiles; circulation half-life; and clearance characteristics. Such characteristics may serve as indicia, independently, as combinations of sub-sets of such indicia, or in totality, for the likelihood that such one or more polypeptides may be successfully developed as a therapeutic candidate, and ultimately an approved drug. Accordingly, as understood in the art, generally, polypeptides with desirable developability characteristics possess, e.g., relatively high solubility, relatively low viscosity, relatively low propensity for aggregation, relatively high chemical stability, relatively high physical stability, relatively long shelf life, relatively high melting temperature, relatively long circulation half-life, relatively long clearance time, and the like. Polypeptides with undesirable developability characteristics possess, e.g., relatively low solubility, relatively high viscosity, relatively high propensity for aggregation, relatively poor chemical stability, relatively poor physical stability, relatively short shelf life, relatively low melting temperature, relatively short circulation half-life, relatively short clearance time, and the like.

[0120] Methods and assays that may be employed to ascertain the degree to which polypeptides, such as anti-CD3 antibodies and/or antigen-binding fragments thereof as described herein, possess desirable developability characteristics are available in the art, and include, for example; PSR assays (WO 2014/179363 and Xu et al., Protein Eng Des Sel, Vol. 26, pages 663-670 (2013)); SMP and SCP assays and the like; cross interaction chromatography (CIC); self-interaction chromatography (SIC); dynamic light scattering; size exclusion chromatography (SEC), dynamic light scattering (DLS) spectroscopy; photon correlation spectroscopy; quasi-elastic light scattering, circular dichroism (CD), viscosity measurements; whole cell binding; tissue micro array methodologies; BVP ELISA assays; AC-SINS assays (Liu et al; MAbs, Vol. 6, pages 483-492 (2014); differential scanning calorimetry; and the like (see, e.g., He et al., J. Pharm. Sci., Vol. 100(4), pp. 1330-1340 (2011); Wagner et al., Pharm. Develop. & Technol (posted online 2012; hyper-text transfer protocol: informahealthcare.com/doi/abs/10.3109/10837450.2011.649851); Hotzel et al., MAbs, Vol. 4(6), pages 753-7601 (2012); Weiqiang et al., J. Pharm. Sci., Vol. 101(5), pp. 1701-1720 (2012); Banks et al., J. Pharm. Sci., Vol. 101(8), pp. 2720-2732 (2012); Lie et al., J. Pharm. Sci., Vol. 94(9), pp. 1928-1948 (2005); and Payne et al., Biopolymers, Vol. 85(5), pp. 527-533 (2006)).

[0121] In some embodiments, antibodies that are identified as possessing decreased developability are so detected by virtue of their interaction with a polyspecificity reagent (“PSR”) and, as such, are referred to as “polyspecific” polypeptides. Such polyspecific antibodies may be referred to as relatively “undevelopable” or relatively “non-developable”.

[0122] A “developability profile” refers to an index that may be assigned to antibodies upon assessing their developability. A developability profile is a measure or metric by which developability of anti-CD3 antibodies may be assessed, compared, and/or ranked. Such developability profiles serve as a measure of the degree of interaction of CD3 binders and antibodies comprising them. The degree of interaction may be assessed by any number of means available in the art that provides an output value that correlates with a strength or affinity of a polypeptide for a moiety to which it is bound. Exemplary means include flow cytometry means, such as FACS; ELISA; quantitative immunoaffinity assays or immunoprecipitation assays; mammalian two-hybrid or yeast two-hybrid assays, and the like. In the context of FACS, as demonstrated in the Examples, a degree of interaction between polypeptides in the plurality and the PSR may be ascertained by generating a mean fluorescence intensity (MFI) for each polypeptide-PSR interaction that is detected, and then ordering the MFI in either ascending or descending order, thereby ranking the polypeptides in the plurality according to the relative degree of interaction between each detected polypeptide and the PSR. Such a ranking provides for a ranking of polypeptides of the plurality such that those polypeptides possessing enhanced developability are readily ascertained, as are those polypeptides possessing decreased developability.

[0123] A developability profile may also take the form of a normalized score, for example, by normalizing developability of anti-CD3 antibodies described herein to the developability of a standard (or control) antibody, e.g., anti-HEL antibody.

[0124] In certain embodiments, inventive engineered pH-dependent CD3 binding domains and antibodies comprising them may be further modified to contain additional nonproteinaceous moieties that are known in the art and are readily available. Moieties suitable for derivatization of an antibody include but are not limited to water soluble polymers. Non-limiting examples of water soluble polymers include, but are not limited to, polyethylene glycol (PEG), copolymers of ethylene glycol/propylene glycol, carboxymethylcellulose, dextran, polyvinyl alcohol, polyvinyl pyrrolidone, poly-1,3-dioxolane, poly-1,3,6-trioxane, ethylene/maleic anhydride copolymer, polyaminoacids (either homopolymers or random copolymers), and dextran or poly(n-vinyl pyrrolidone)polyethylene glycol, polypropylene glycol homopolymers, polypropylene oxide/ethylene oxide co-polymers, polyoxyethylated polyols (e.g., glycerol), polyvinyl alcohol, and mixtures thereof. Polyethylene glycol propionaldehyde may have advantages in manufacturing due to its stability in water. The polymer may be of any molecular weight and may be branched or unbranched. The number of polymers attached to the antibody may vary, and if more than one polymer is attached, they can be the same or different molecules. In general, the number and/or type of polymers used for derivatization can be determined based on considerations including, but not limited to, the particular properties or functions of the antibody to be improved, whether the antibody derivative will be used in a therapy under defined conditions, etc.

[0125] In certain embodiments, engineered pH-dependent CD3 binding domains and antibodies comprising them display an enhanced developability profile. The developability profile for anti-CD3 antibodies is obtained by performing one or more of a PSR assay; an SCP assay; AC-SINS; an ELISA; a DSF assay; a Tm assay; a HIC assay; a CIC assay; or combinations thereof.

[0126] In other embodiments, anti-CD3 antibodies and/or antigen-binding fragments thereof as described herein display a poly-specificity reagent (PSR) score of between about 0.0 and about 0.45. In some embodiments, the PSR is between about 0.0 and about 0.4. In some embodiments, the PSR is between about 0.0 and about 0.35. In some embodiments, the PSR is between about 0.0 and about 0.3. In some embodiments, the PSR is between about 0.0 and about 0.25. In some embodiments, the PSR is between about 0.0 and about 0.2. In some embodiments, the PSR is between about 0.0 and about 0.15. In some embodiments, the PSR is between about 0.0 and about 0.1. In some embodiments, a score of 0.0-0.1 is “clean PSR”. In some embodiments, a score of 0.1 to 0.33 is “low PSR”. In some embodiments, a score of 0.33 to 0.66 is “medium PSR”. In some embodiments, a score of 0.66-1.00 is “high PSR”. In some embodiments, a high PSR score is indicative of decreased (or poor) developability. Generally, the lower the PSR score the more favorable the developability of the antibody.

[0127] In still other embodiments, anti-CD3 antibodies or antigen-binding fragment thereof as described herein display an HIC score of less than about 10.5 minutes (a clean to low HIC score). In some embodiments, an HIC score is between about 10.5 minutes and 11.5 minutes (a medium HIC score). In some embodiments, an HIC score is greater than about 11.5 minutes (a high HIC score). Generally, the lower the HIC score the more favorable the developability of the antibody.

[0128] In yet other embodiments, anti-CD3 antibodies and/or antigen-binding fragments thereof as described herein display an SEC score of less than about 95%, which indicates that the antibody is a monomer, i.e., not aggregating.

[0129] In still other embodiments, anti-CD3 antibodies and/or antigen-binding fragments thereof as described herein display a Tm of less than about 65° C.

[0130] In some embodiments, anti-CD3 antibodies and/or antigen-binding fragments thereof as described herein may be further modified to minimize effector function, e.g., a silent Fc.

[0131] “Effector function” refers to biological activities attributable to the Fc region of an antibody, which varies by antibody isotype. Exemplary effector functions include: C1q binding and complement dependent cytotoxicity (CDC); Fc receptor binding; antibody-dependent cell-mediated cytotoxicity (ADCC); phagocytosis; down regulation of cell surface receptors (e.g., B cell receptor); and B cell activation.

[0132] “Fc region” is a C-terminal region of an immunoglobulin heavy chain that contains at least a portion of the constant region, including native sequence Fc regions and variant Fc regions. A human IgG heavy chain Fc region can extend from Cys226, or from Pro230, to the carboxyl-terminus of the heavy chain. However, the C-terminal lysine (Lys447) of the Fc region may or may not be present. Unless otherwise specified herein, numbering of amino acid residues in the Fc region or constant region is according to the EU numbering system, also called the EU index, as described in Kabat et al., Sequences of Proteins of Immunological Interest, 5th Ed. Public Health Service, National Institutes of Health, Bethesda, Md., 1991.

[0133] In certain embodiments, one or more amino acid modifications may be introduced into the Fc region of an anti-CD3 antibody of the disclosure, thereby generating an Fc region variant (see, e.g., US 2012/0251531). An Fc region variant may comprise a human Fc region sequence (e.g., a human IgG1, IgG2, IgG3 or IgG4 Fc region) comprising an amino acid modification (e.g., a substitution) at one or more amino acid positions.

[0134] In certain embodiments, the disclosure contemplates an anti-CD3 antibody variant that possesses some but not all effector functions, which make it a desirable candidate for applications in which the half-life of an antibody in vivo is important yet certain effector functions (such as complement and ADCC) are unnecessary or deleterious. In vitro and/or in vivo cytotoxicity assays can be conducted to confirm reduction/depletion of CDC and/or ADCC activities. For example, Fc receptor (FcR) binding assays can be conducted to ensure that an antibody lacks FcγR binding (hence likely lacking ADCC activity) but retains FcRn binding ability. The primary cells for mediating ADCC (e.g. NK cells), express FcγRIII only, whereas monocytes express FcγRI, FcγRII and FcγRIII. FcR expression on hematopoietic cells is summarized in Table 3 on page 464 of Ravetch and Kinet, Annu. Rev. Immunol. 9:457-492 (1991). Non-limiting examples of in vitro assays to assess ADCC activity of a molecule of interest is described in U.S. Pat. No. 5,500,362 (see, e.g. Hellstrom, I. et al. Proc. Nat'l Acad. Sci. USA 83:7059-7063 (1986)) and Hellstrom, I et al., Proc. Nat'l Acad. Sci. USA 82:1499-1502 (1985); U.S. Pat. No. 5,821,337 (see, Bruggemann, M. et al., J. Exp. Med. 166:1351-1361 (1987)). Alternatively, non-radioactive assay methods may be employed (see, for example, ACTI™ non-radioactive cytotoxicity assay for flow cytometry (Cell Technology, Inc. Mountain View, Calif.); and CytoTox 96® non-radioactive cytotoxicity assay (Promega, Madison, Wis.)). Useful effector cells for such assays include peripheral blood mononuclear cells (PBMC) and Natural Killer (NK) cells. Alternatively, or additionally, ADCC activity of the molecule of interest may be assessed in vivo, e.g., in an animal model such as that disclosed in Clynes et al. Proc. Nat'l Acad. Sci. USA 95:652-656 (1998). C1q binding assays may also be carried out to confirm that an antibody is unable to bind C1q and hence lacks CDC activity. See, e.g., C1q and C3c binding ELISA in WO 2006/029879 and WO 2005/100402. To assess complement activation, a CDC assay may be performed (see, for example, Gazzano-Santoro et al. J. Immunol Methods 202:163 (1996); Cragg, M. S. et al. Blood. 101:1045-1052 (2003); and Cragg, M. S. and M. J. Glennie Blood. 103:2738-2743 (2004)). FcRn binding and in vivo clearance/half-life determinations can also be performed using methods known in the art (see, e.g., Petkova, S. B. et al. Int'l. Immunol 18(12):1759-1769 (2006)).

[0135] In some embodiments, antibodies with reduced effector function include those with substitution of one or more of Fc region residues 238, 265, 269, 270, 297, 327 and 329 (U.S. Pat. Nos. 6,737,056 and 8,219,149). In some embodiments, Fc mutants include Fc mutants with substitutions at two or more of amino acid positions 265, 269, 270, 297 and 327, including the so-called “DANA” Fc mutant with substitution of residues 265 and 297 to alanine (U.S. Pat. Nos. 7,332,581 and 8,219,149).

[0136] In other embodiments, anti-CD3 antibodies and/or antigen-binding fragments thereof as described herein are further modified to include a masking agent, e.g., a polypeptide mask, attached via a cleavable linker.

[0137] In some embodiments, anti-CD3 antibodies and/or antigen-binding fragments thereof as described herein are conjugated to a therapeutic moiety thereby forming an immunoconjugate. An “immunoconjugate” is an antibody conjugated to one or more heterologous molecule(s) such as, e.g., an antibiotic, a second anti-CD3 antibody, a vaccine, or a toxoid, or any other therapeutic moiety.

[0138] In certain embodiments, anti-CD3 antibodies and/or antigen-binding fragments thereof as described herein are altered to increase or decrease the extent to which the antibody is glycosylated. Addition or deletion of glycosylation sites to an anti-CD3 antibody of the disclosure may be conveniently accomplished by altering the amino acid sequence such that one or more glycosylation sites is created or removed.

### Production of the Anti-CD3 Antibodies and Antigen-Binding Fragments Thereof

[0139] Anti-CD3 antibodies and/or antigen-binding fragments thereof may be produced using recombinant methods. For example, isolated nucleic acids encoding an anti-CD3 antibody as described herein is provided. Such nucleic acids may encode an amino acid sequence comprising the VL, and/or an amino acid sequence comprising the VH of the antibody (e.g., the light and/or heavy chains of the antibody). In a further embodiment, one or more vectors (e.g., expression vectors) comprising such nucleic acids are provided. In a further embodiment, a host cell comprising such nucleic acids is provided. In one such embodiment, a host cell comprises (e.g., has been transformed with): (1) a vector comprising a nucleic acid sequence that encodes an amino acid sequence comprising the VL of the antibody and an amino acid sequence comprising the VH of the antibody, or (2) a first vector comprising a nucleic acid that encodes an amino acid sequence comprising the VL of the antibody and a second vector comprising a nucleic acid that encodes an amino acid sequence comprising the VH of the antibody. In one embodiment, the host cell is eukaryotic, e.g. a Chinese Hamster Ovary (CHO) cell or lymphoid cell (e.g., Y0, NS0, Sp20 cell). In one embodiment, a method of making an anti-CD3 antibody is provided, wherein the method comprises culturing a host cell comprising a nucleic acid encoding the antibody, as provided above, under conditions suitable for expression of the antibody, and optionally recovering the antibody from the host cell (or host cell culture medium).

[0140] The term “host cell” refers to cells into which an exogenous nucleic acid sequence has been introduced, including the progeny of such cells. Host cells include transformants and transformed cells, which include the primary transformed cell and progeny derived therefrom without regard to the number of passages.

[0141] For recombinant production of an anti-CD3 antibody, nucleic acids encoding an antibody, e.g., as described above, is isolated and inserted into one or more vectors for further cloning and/or expression in a host cell. Such nucleic acids may be readily isolated and sequenced using conventional procedures (e.g., by using oligonucleotide probes that are capable of binding specifically to genes encoding the heavy and light chains of the antibody).

[0142] Suitable host cells for cloning and/or expression of antibody-encoding vectors include prokaryotic or eukaryotic cells. For example, antibodies may be produced in bacteria, in particular when glycosylation and Fc effector function are not needed. For expression of antibody fragments and polypeptides in bacteria, see, e.g., U.S. Pat. Nos. 5,648,237, 5,789,199, and 5,840,523. (See also, Charlton, Methods in Molecular Biology, Vol. 248 (B. K. C. Lo, ed., Humana Press, Totowa, N.J., 2003), pp. 245-254, describing expression of antibody fragments in E. coli.) After expression, the antibody may be isolated from the bacterial cell paste in a soluble fraction and can be further purified. In addition to prokaryotes, eukaryotic microbes such as filamentous fungi or yeast are suitable cloning or expression hosts for antibody-encoding vectors, including fungi and yeast strains whose glycosylation pathways have been “humanized,” resulting in the production of an antibody with a partially or fully human glycosylation pattern. See, e.g., Gerngross, Nat. Biotech. 22:1409-1414 (2004), and Li et al., Nat. Biotech. 24:210-215 (2006); WO 2009/036379; WO 2010/105256; and WO 2012/009568.

[0143] Plant cell cultures can also be utilized as hosts. See, e.g., U.S. Pat. Nos. 5,959,177, 6,040,498, 6,420,548, 7,125,978, and 6,417,429 (describing PLANTIBODIES™ technology for producing antibodies in transgenic plants). Vertebrate cells may also be used as hosts. For example, mammalian cell lines that are adapted to grow in suspension may be useful. Other examples of useful mammalian host cell lines are monkey kidney CV1 line transformed by SV40 (COS-7); human embryonic kidney line (293 or 293 cells as described, e.g., in Graham et al., J. Gen Virol. 36:59 (1977)); baby hamster kidney cells (BHK); mouse sertoli cells (TM4 cells as described, e.g., in Mather, Biol. Reprod. 23:243-251 (1980)); monkey kidney cells (CV1); African green monkey kidney cells (VERO-76); human cervical carcinoma cells (HELA); canine kidney cells (MDCK; buffalo rat liver cells (BRL 3A); human lung cells (W138); human liver cells (Hep G2); mouse mammary tumor (MMT 060562); TRI cells, as described, e.g., in Mather et al., Annals N. Y. Acad. Sci. 383:44-68 (1982); MRC 5 cells; and FS4 cells. Other useful mammalian host cell lines include Chinese hamster ovary (CHO) cells, including DHFR-CHO cells (Urlaub et al., Proc. Natl. Acad. Sci. USA 77:4216 (1980)); and myeloma cell lines such as Y0, NS0 and Sp²/0. For a review of certain mammalian host cell lines suitable for antibody production, see, e.g., Yazaki and Wu, Methods in Molecular Biology, Vol. 248 (B. K. C. Lo, ed., Humana Press, Totowa, N.J.), pp. 255-268 (2003).

[0144] Anti-CD3 antibodies and/or antigen-binding fragments thereof may be identified, screened for, selected for or characterized for their physical/chemical properties and/or biological activities by various assays known in the art, e.g., ELISA, Western blot, etc. or competition assays may be used to identify an antibody that competes with an anti-CD3 antibody of the disclosure for binding to CD3. In an exemplary competition assay, immobilized CD3 is incubated in a solution comprising a first labeled antibody that binds to CD3 and a second unlabeled antibody that is being tested for its ability to compete with the first antibody for binding to CD3. The second antibody may be present in a hybridoma supernatant. As a control, immobilized CD3 is incubated in a solution comprising the first labeled antibody but not the second unlabeled antibody. After incubation under conditions permissive for binding of the first antibody to CD3, excess unbound antibody is removed, and the amount of label associated with immobilized CD3 is measured. If the amount of label associated with immobilized CD3 is substantially reduced in the test sample relative to the control sample, then that indicates that the second antibody is competing with the first antibody for binding to CD3. See, e.g., Harlow and Lane (1988) Antibodies: A Laboratory Manual. Ch. 14 (Cold Spring Harbor Laboratory, Cold Spring Harbor, N.Y.).

[0145] Anti-CD3 antibodies and/or antigen-binding fragments thereof possessing biological activity may be identified using standard approaches. Biological activity may include, e.g., binding to CD3 on the surface of a T cell either in vivo, in vitro, or ex vivo. In the case of a multispecific anti-CD3 antibody (such as a bispecific antibody with one arm that binds to CD3 and another arm that binds to a different target, e.g., a cell surface antigen, e.g., a tumor antigen), biological activity may also include effector cell activation (such as CD8+ and/or CD4+ T cell) activation), effector cell population expansion (i.e., an increase in T cell count), target cell population reduction (i.e., a decrease in the population of cells expressing the second biological molecule on their cell surfaces), and/or target cell killing.

### Diagnostic and Therapeutic Uses for the Anti-CD3 Antibodies and Antigen-Binding Fragments Thereof

[0146] Anti-CD3 antibodies and/or antigen-binding fragments described herein may be used for diagnosis and/or detection. “Detection” as used herein encompasses quantitative or qualitative detection.

[0147] In certain embodiments, labeled anti-CD3 antibodies are provided. Anti-CD3 antibodies and/or antigen-binding fragments thereof as described herein may include a label or moiety that is detected directly (such as fluorescent, chromophoric, electron-dense, chemiluminescent, and radioactive labels or indirectly (such as enzymes or ligands). Non-limiting exemplary labels include, radioisotopes such as 32P, 14C, 125I, 3H, and 131I; fluorophores such as rare earth chelates or fluorescein and its derivatives, rhodamine and its derivatives, dansyl, umbelliferone, luceriferases, e.g., firefly luciferase and bacterial luciferase (U.S. Pat. No. 4,737,456), luciferin, 2,3-dihydrophthalazinediones, horseradish peroxidase (HRP), alkaline phosphatase, β-galactosidase, glucoamylase, lysozyme, saccharide oxidases, e.g., glucose oxidase, galactose oxidase, and glucose-6-phosphate dehydrogenase; heterocyclic oxidases such as uricase and xanthine oxidase, coupled with an enzyme that employs hydrogen peroxide to oxidize a dye precursor such as HRP, lactoperoxidase, or microperoxidase; biotin/avidin; spin labels; bacteriophage labels; stable free radicals; and the like.

[0148] CD3 antibodies and/or antigen-binding fragments thereof as described herein, as well as pharmaceutical compositions of such antibodies, may be used in therapeutic methods. In one embodiment, anti-CD3 antibodies and/or antigen-binding fragments thereof as described herein or pharmaceutical compositions comprising such antibodies may be used for treating or delaying progression of a cell proliferative disorder or an autoimmune disorder. In some embodiments, the anti-CD3 antibodies and antigen-binding fragments thereof may be used in treating cancers. Tumor cells typically have an extracellular pH of around about 6.3-6.5; the anti-CD3 antibodies and antigen-binding fragments described herein promote preferential CD3 binding at low(er) pH values, e.g., around pH 6, and thereby promote binding and activity in and around the tumor microenvironment. In some embodiments, use of the anti-CD antibodies and antigen-binding fragments thereof may result in selective and sustained cytotoxic activity at or around the tumor site, thereby reducing or eliminating off-target effects.

[0149] A “disorder” refers to any condition or disease that would benefit from treatment including, but not limited to, chronic and acute disorders or diseases including those pathological conditions which predispose a mammal to the disorder in question.

[0150] The terms “cell proliferative disorder” and “proliferative disorder” refer to disorders that are associated with some degree of abnormal cell proliferation. Cell proliferative disorders include cancer, e.g., a tumor.

[0151] “Tumor” as used herein refers to all neoplastic cell growth and proliferation, whether malignant or benign, and all pre-cancerous and cancerous cells and tissues.

[0152] “Cancer” refers to a physiological condition in mammals characterized by unregulated cell growth. Examples of cancer include, but are not limited to, carcinoma, lymphoma, blastoma, sarcoma, and leukemia or lymphoid malignancies; with more particular examples including squamous cell cancer (e.g., epithelial squamous cell cancer), lung cancer including small-cell lung cancer, non-small cell lung cancer, adenocarcinoma of the lung and squamous carcinoma of the lung, cancer of the peritoneum, hepatocellular cancer, gastric or stomach cancer including gastrointestinal cancer and gastrointestinal stromal cancer, pancreatic cancer, glioblastoma, cervical cancer, ovarian cancer, liver cancer, bladder cancer, cancer of the urinary tract, hepatoma, breast cancer, colon cancer, rectal cancer, colorectal cancer, endometrial or uterine carcinoma, salivary gland carcinoma, kidney or renal cancer, prostate cancer, vulval cancer, thyroid cancer, hepatic carcinoma, anal carcinoma, penile carcinoma, melanoma, superficial spreading melanoma, lentigo maligna melanoma, acral lentiginous melanomas, nodular melanomas, multiple myeloma and B-cell lymphoma (including low grade/follicular non-Hodgkin's lymphoma (NHL); small lymphocytic (SL) NHL; intermediate grade/follicular NHL; intermediate grade diffuse NHL; high grade immunoblastic NHL; high grade lymphoblastic NHL; high grade small non-cleaved cell NHL; bulky disease NHL; mantle cell lymphoma; AIDS-related lymphoma; and Waldenstrom's Macroglobulinemia); chronic lymphocytic leukemia (CLL); acute lymphoblastic leukemia (ALL); hairy cell leukemia; chronic myeloblastic leukemia; and post-transplant lymphoproliferative disorder (PTLD), as well as abnormal vascular proliferation associated with phakomatoses, edema (such as that associated with brain tumors), Meigs' syndrome, brain, as well as head and neck cancer, and associated metastases. In certain embodiments, cancers that are amenable to treatment by antibodies of the disclosure include breast cancer, colorectal cancer, rectal cancer, non-small cell lung cancer, glioblastoma, non-Hodgkins lymphoma (NHL), renal cell cancer, prostate cancer, liver cancer, pancreatic cancer, soft-tissue sarcoma, kaposi's sarcoma, carcinoid carcinoma, head and neck cancer, ovarian cancer, mesothelioma, and multiple myeloma. In some embodiments, the cancer is selected from: small cell lung cancer, gliblastoma, neuroblastomas, melanoma, breast carcinoma, gastric cancer, colorectal cancer (CRC), and hepatocellular carcinoma. Yet, in some embodiments, the cancer is selected from: non-small cell lung cancer, colorectal cancer, glioblastoma and breast carcinoma, including metastatic forms of those cancers. In other embodiments, the cancer is selected from a class of mature B-Cell cancers excluding Hodgkin's Lymphoma but including germinal-center B-cell-like (GCB) DLBCL, activated B-cell-like (ABC) DLBCL, follicular lymphoma (FL), mantle cell lymphoma (MCL), acute myeloid leukemia (AML), chronic lymphoid leukemia (CLL), marginal zone lymphoma (MZL), small lymphocytic leukemia (SLL), lymphoplasmacytic lymphoma (LL), Waldenstrom macroglobulinemia (WM), central nervous system lymphoma (CNSL), Burkitt's lymphoma (BL), B-cell prolymphocytic leukemia, Splenic marginal zone lymphoma, Hairy cell leukemia, Splenic lymphoma/leukemia, unclassifiable, Splenic diffuse red pulp small B-cell lymphoma, Hairy cell leukemia variant, Waldenstrom macroglobulinemia, Heavy chain diseases, a Heavy chain disease, γ Heavy chain disease, μ Heavy chain disease, Plasma cell myeloma, Solitary plasmacytoma of bone, Extraosseous plasmacytoma, Extranodal marginal zone lymphoma of mucosa-associated lymphoid tissue (MALT lymphoma), Nodal marginal zone lymphoma, Pediatric nodal marginal zone lymphoma, Pediatric follicular lymphoma, Primary cutaneous follicle centre lymphoma, T-cell/histiocyte rich large B-cell lymphoma, Primary DLBCL of the CNS, Primary cutaneous DLBCL, leg type, EBV-positive DLBCL of the elderly, DLBCL associated with chronic inflammation, Lymphomatoid granulomatosis, Primary mediastinal (thymic) large B-cell lymphoma, Intravascular large B-cell lymphoma, ALK-positive large B-cell lymphoma, Plasmablastic lymphoma, Large B-cell lymphoma arising in HHV8-associated multicentric Castleman disease, Primary effusion lymphoma: B-cell lymphoma, unclassifiable, with features intermediate between diffuse large B-cell lymphoma and Burkitt lymphoma, and B-cell lymphoma, unclassifiable, with features intermediate between diffuse large B-cell lymphoma and classical Hodgkin lymphoma.

[0153] As used herein, “treatment” or “treat” or “treating” refer to clinical intervention in an attempt to alter the natural course of an individual being treated and can be performed either for prophylaxis or during the course of clinical pathology. Desirable effects of treatment include, but are not limited to, preventing occurrence or recurrence of disease, alleviation of symptoms, diminishment of any direct or indirect pathological consequences of the disease, preventing metastasis, decreasing the rate of disease progression, amelioration or palliation of the disease state, and remission or improved prognosis.

[0154] As used herein, the terms “prevent,” “preventing,” and “prevention” refer to the prevention or inhibition of the development or onset of a disorder or disease.

[0155] As used herein, the terms “ameliorate” and “alleviate” refer to a reduction or diminishment in the severity a condition or any symptoms thereof.

[0156] In some embodiments, antibodies of the disclosure are used to delay development of a disorder or disease or to delay the progression of a disorder or disease. As used herein, “delaying progression” of a disorder or disease means to defer, hinder, slow, retard, stabilize, and/or postpone development of the disease or disorder (e.g., a cell proliferative disorder, e.g., cancer). The delay can be of varying lengths of time, depending on the history of the disease and/or individual being treated.

[0157] An effective amount of such antibody or composition may be administered to an individual suffering from cancer or arthritis, rheumatoid arthritis, colitis, inflammatory bowel disease, autoimmune type I diabetes, etc. An “effective amount” of an anti-CD3 antibody disclosed herein or a composition (e.g., pharmaceutical composition) comprising such antibody, is at least the minimum amount required to achieve the desired therapeutic or prophylactic result, e.g., a measurable improvement or prevention of a particular disorder, e.g., a cell proliferative disorder, e.g., cancer, preferably with minimal or no toxic or detrimental effects. An effective amount may vary according to inter alia disease state, age, sex, and weight of the patient, and the ability of the antibody (or antigen-binding fragment thereof) to elicit a desired response in the individual and, in some instances, by co-administering one or more additional therapeutic agents.

[0158] In some embodiments, anti-CD3 antibodies and/or antigen-binding fragments thereof as described herein may be used to enhance immune function in an individual having a cell proliferative disorder or an autoimmune disorder. Following administration, such antibody or composition may enhance immune function in an individual having a cell proliferative disorder or an autoimmune disorder by activating effector cells (e.g., T cells, e.g., CD8+ and/or CD4+ T cells including Tregs), expanding (increasing) the effector cell population, reducing the population of target cells (e.g., a cell expressing a second biological molecule recognized by an anti-CD3 antibody of the disclosure, such as a bispecific antibody), and/or killing a target cell (e.g., target tumor cell).

[0159] Anti-CD3 antibodies and/or antigen-binding fragments thereof as disclosed herein may be used to treat disorders including, but not limited to, a proliferative disorder, an oncological disorder, an immune-oncological disorder, a neurological disorder, a cognitive disorder, a neurodegenerative disorder, an autoimmune disorder. In one embodiment, an effective amount of such anti-CD3 antibody may be administered, alone or in combination with at least one additional agent, to an individual having such disorder. Such “individual” may be a mammal and, in particular, a human.

[0160] Non-limiting exemplary additional therapeutic agents include a chemotherapy agent, an antibody-drug conjugate (ADC), and/or a biological modifier. Chemotherapy agents may be selected from cyclophosphamide, doxorubicin, vincristine, and prednisolone (CHOP). ADC may be selected from an anti-CD79b antibody drug conjugate (such as anti-CD79b-MC-vc-PAB-MMAE or the anti-CD79b antibody drug conjugate described in any one of U.S. Pat. No. 8,088,378 and/or US 2014/0030280, or polatuzumab vedotin), an anti-CD19 antibody drug conjugate, an anti-CD22 antibody drug conjugate, an anti-CD45 antibody drug conjugate, and an anti-CD32 drug conjugate. A biological modifier may be selected from a BCL-2 inhibitor (such as GDC-0199/ABT-199), lenalidomide (Revlimid®), a PI3K-delta inhibitor (such as idelalisib (Zydelig®)), a PD-1 axis binding antagonist, an agonist, e.g., agonist antibody, directed against an activating co-stimulatory molecule, e.g., CD40, CD226, CD28, OX40 (e.g., AgonOX), GITR, CD137 (also known as TNFRSF9, 4-1 BB, or ILA), CD27 (e.g., CDX-1127), HVEM, or CD127, an antagonist, e.g., antagonist antibody, directed against an inhibitory co-stimulatory molecule, e.g., CTLA-4 (also known as CD152), PD-1, TIM-3, BTLA, VISTA, LAG-3, B7-H3, B7-H4, IDO (e.g., 1-methyl-D-tryptophan (also known as 1-D-MT)), TIGIT, MICA/B, GITR (e.g., TRX518) or arginase, ipilimumab (also known as MDX-010, MDX-101, or Yervoy®), tremelimumab (also known as ticilimumab or CP-675,206, urelumab (also known as BMS-663513), MGA271, an antagonist directed against a TGF beta, e.g., metelimumab (also known as CAT-192), fresolimumab (also known as GC1008), LY2157299k, and an adoptive transfer of a T cell (e.g., a cytotoxic T cell or CTL) expressing a chimeric antigen receptor (CAR), e.g., adoptive transfer of a T cell comprising a dominant-negative TGF beta receptor, e.g, a dominant-negative TGF beta type II receptor.

[0161] Anti-CD3 antibodies and/or antigen-binding fragments thereof as disclosed herein may be used to enhancing immune function in an individual, e.g., a human, having a disorder in an individual having such disorder. In one embodiment, a method of enhancing immune function comprises administering to an individual an effective amount of an anti-CD3 antibody to activate effector cells (e.g., T cells, e.g., CD8+ and/or CD4+ T cells), expand (increase) an effector cell population, reduce a target cell population, and/or kill a target cell (e.g., target tumor cell).

[0162] In a further aspect, pharmaceutical formulations comprising anti-CD3 antibodies and/or antigen-binding fragments as described herein are also provided, e.g., for use in any of the above therapeutic methods. A “pharmaceutical formulation” refers to a preparation in such form as to permit the biological activity of an active ingredient contained therein, such as the anti-CD3 antibodies described herein, to be effective and which preferably contains no additional components which are unacceptably toxic to a subject to which the formulation would be administered.

[0163] In one embodiment, a pharmaceutical formulation comprises any of the anti-CD3 antibodies disclosed herein and a pharmaceutically acceptable carrier. A “pharmaceutically acceptable carrier” refers to an ingredient in a pharmaceutical formulation, other than an active ingredient, which is nontoxic to a subject. A pharmaceutically acceptable carrier includes, but is not limited to, a buffer, excipient, stabilizer, or preservative. In another embodiment, a pharmaceutical formulation comprises any of the anti-CD3 antibodies provided herein and at least one additional therapeutic agent.

[0164] Antibodies of the disclosure can be used either alone or in combination with other agents in a therapy, e.g., an anti-CD3 antibody and/or antigen-binding fragment thereof may be co-administered with at least one additional therapeutic agent. In certain embodiments, an additional therapeutic agent is a chemotherapeutic agent, growth inhibitory agent, cytotoxic agent, agent used in radiation therapy, anti-angiogenesis agent, apoptotic agent, anti-tubulin agent, or other agent, such as a epidermal growth factor receptor (EGFR) antagonist (e.g., a tyrosine kinase inhibitor), HER1/EGFR inhibitor (e.g., erlotinib (Tarceva™)), platelet derived growth factor inhibitor (e.g., Gleevec™ (Imatinib Mesylate)), a COX-2 inhibitor (e.g., celecoxib), interferon, cytokine, antibody other than the anti-CD3 antibody of the disclosure, such as an antibody that bind to one or more of the following targets ErbB2, ErbB3, ErbB4, PDGFR-beta, BIyS, APRIL, BCMA VEGF, or VEGF receptor(s), TRAIL/Apo2, PD-1, PD-L1, PD-L2, or another bioactive or organic chemical agent.

[0165] In some embodiments, the disclosure provides a method wherein the additional therapeutic agent is a glucocorticoid. In one embodiment, the glucocorticoid is dexamethasone.

[0166] Such combination therapies noted above encompass combined administration (where two or more therapeutic agents are included in the same or separate formulations), and separate administration, in which case, administration of the antibody of the disclosure can occur prior to, simultaneously, and/or following, administration of additional therapeutic agent or agents. In one embodiment, administration of the anti-CD3 antibody and administration of an additional therapeutic agent occur within about one month, or within about one, two or three weeks, or within about one, two, three, four, five, or six days, of each other. Anti-CD3 antibodies of the disclosure (e.g., bispecific anti-CD3 antibodies of the disclosure that bind to CD3 and a second biological molecule, e.g., a cell surface antigen, e.g., a tumor antigen, such as a TDB antibody of the disclosure or variant thereof) can also be used in combination with radiation therapy.

[0167] An antibody of the disclosure (and/or any additional therapeutic agent) can be administered by any suitable means, including parenteral, intrapulmonary, and intranasal, and, if desired for local treatment, intralesional administration. Parenteral infusions include intramuscular, intravenous, intraarterial, intraperitoneal, or subcutaneous administration. In some embodiments, the antibody is administered by subcutaneous administration. In some embodiments, an anti-CD3 antibody administered by subcutaneous injection exhibits a less toxic response in a patient than the same anti-CD3 antibody administered by intravenous injection. Dosing can be by any suitable route, for example, by injections, such as intravenous or subcutaneous injections, depending in part on whether the administration is brief or chronic. Various dosing schedules including but not limited to single or multiple administrations over various time-points, bolus administration, and pulse infusion are contemplated herein.

[0168] Antibodies of the disclosure would be formulated, dosed, and administered in a fashion consistent with good medical practice. Factors for consideration in this context include the particular disorder being treated, the particular mammal being treated, the clinical condition of the individual patient, the cause of the disorder, the site of delivery of the agent, the method of administration, the scheduling of administration, and other factors known to medical practitioners. The antibody need not, but may optionally be, formulated with one or more agents currently used to prevent or treat the disorder in question. The effective amount of such other agents depends on the amount of antibody present in the formulation, the type of disorder or treatment, and other factors discussed above. These are generally used in the same dosages and with administration routes as described herein, or about from 1 to 99% of the dosages described herein, or in any dosage and by any route that is empirically/clinically determined to be appropriate.

[0169] For the prevention or treatment of disease, the appropriate dosage of an antibody of the disclosure (when used alone or in combination with one or more other additional therapeutic agents) will depend on the type of disease to be treated, the type of antibody, the severity and course of the disease, whether the antibody is administered for preventive or therapeutic purposes, previous therapy, the patient's clinical history and response to the antibody, and the discretion of the attending physician. The antibody is suitably administered to the patient at one time or over a series of treatments.

[0170] As a general proposition, a therapeutically effective amount of the anti-CD3 antibody administered to human will be in the range of about 0.01 to about 100 mg/kg of patient body weight whether by one or more administrations. In some embodiments, an antibody used is administered in about 0.01 to about 45 mg/kg, about 0.01 to about 40 mg/kg, about 0.01 to about 35 mg/kg, about 0.01 to about 30 mg/kg, about 0.01 to about 25 mg/kg, about 0.01 to about 20 mg/kg, about 0.01 to about 15 mg/kg, about 0.01 to about 10 mg/kg, about 0.01 to about 5 mg/kg, or about 0.01 to about 1 mg/kg daily, for example. In one embodiment, an anti-CD3 antibody described herein is administered to a human at a dose of about 100 mg, about 200 mg, about 300 mg, about 400 mg, about 500 mg, about 600 mg, about 700 mg, about 800 mg, about 900 mg, about 1000 mg, about 1100 mg, about 1200 mg, about 1300 mg or about 1400 mg on day 1 of 21-day cycles. The dose may be administered as a single dose or as multiple doses (e.g., 2 or 3 doses), such as infusions. For repeated administrations over several days or longer, depending on the condition, the treatment would generally be sustained until a desired suppression of disease symptoms occurs. One exemplary dosage of the antibody would be in the range from about 0.05 mg/kg to about 10 mg/kg. Thus, one or more doses of about 0.5 mg/kg, 2.0 mg/kg, 4.0 mg/kg, or 10 mg/kg (or any combination thereof) may be administered to the patient. Such doses may be administered intermittently, for example, every week or every three weeks (e.g., such that the patient receives from about two to about twenty, or, for example, about six doses of the anti-CD3 antibody). An initial higher loading dose, followed by one or more lower doses, may be administered. The progress of this therapy is easily monitored by conventional techniques and assays.

[0171] In some embodiments, methods of the disclosure may further comprise an additional therapy. The additional therapy may be radiation therapy, surgery, chemotherapy, gene therapy, DNA therapy, viral therapy, RNA therapy, immunotherapy, bone marrow transplantation, nanotherapy, monoclonal antibody therapy, or a combination of the foregoing. The additional therapy may be in the form of adjuvant or neoadjuvant therapy. In some embodiments, the additional therapy is the administration of small molecule enzymatic inhibitor or anti-metastatic agent. In some embodiments, the additional therapy is the administration of side-effect limiting agents (e.g., agents intended to lessen the occurrence and/or severity of side effects of treatment, such as anti-nausea agents, etc.). In some embodiments, the additional therapy is radiation therapy. In some embodiments, the additional therapy is surgery. In some embodiments, the additional therapy is a combination of radiation therapy and surgery. In some embodiments, the additional therapy is gamma irradiation. In some embodiments, the additional therapy may be a separate administration of one or more of the therapeutic agents described above.

[0172] In another aspect of the disclosure, an article of manufacture containing materials useful for the treatment, prevention and/or diagnosis of the disorders described above is provided. The article of manufacture comprises a container and a label or package insert on or associated with the container. Suitable containers include, for example, bottles, vials, syringes, IV solution bags, etc. The containers may be formed from a variety of materials such as glass or plastic. The container holds a composition which is by itself or combined with another composition effective for treating, preventing and/or diagnosing the condition and may have a sterile access port (for example the container may be an intravenous solution bag or a vial having a stopper pierceable by a hypodermic injection needle). At least one active agent in the composition is an antibody of the disclosure. The label or package insert indicates that the composition is used for treating the condition of choice. Moreover, the article of manufacture may comprise (a) a first container with a composition contained therein, wherein the composition comprises an antibody of the disclosure; and (b) a second container with a composition contained therein, wherein the composition comprises a further cytotoxic or otherwise therapeutic agent. The article of manufacture in this embodiment of the disclosure may further comprise a package insert indicating that the compositions can be used to treat a particular condition. Alternatively, or additionally, the article of manufacture may further comprise a second (or third) container comprising a pharmaceutically acceptable buffer, such as bacteriostatic water for injection (BWFI), phosphate-buffered saline, Ringer's solution and dextrose solution. It may further include other materials desirable from a commercial and user standpoint, including other buffers, diluents, filters, needles, and syringes.

[0173] Accordingly, manufacture and/or preparation of a pharmaceutical composition comprising anti-CD3 antibodies and/or antigen-binding fragments as disclosed herein is also contemplated. The composition may be used alone or in combination with other active agents to treat a cell proliferative disorder (e.g., cancer) or an autoimmune disorder (e.g., arthritis, rheumatoid arthritis, colitis, inflammatory bowel disease, autoimmune type I diabetes, etc.).

[0174] In some embodiments, pharmaceutical compositions comprising anti-CD3 antibodies and/or antigen-binding fragments thereof as described herein are prepared, e.g., by mixing such antibody having the desired degree of purity with one or more optional pharmaceutically acceptable carriers (Remington's Pharmaceutical Sciences 16th edition, Osol, A. Ed. (1980)), in the form of lyophilized formulations or aqueous solutions, optionally prepared for modified (e.g., sustained) release. Exemplary lyophilized antibody formulations are described in U.S. Pat. No. 6,267,958. Aqueous antibody formulations include those described in U.S. Pat. No. 6,171,586 and WO2006/044908, the latter formulations including a histidine-acetate buffer.

[0175] Pharmaceutically acceptable carriers are generally nontoxic to recipients at the dosages and concentrations employed, and include, but are not limited to: buffers such as phosphate, citrate, and other organic acids; antioxidants including ascorbic acid and methionine; preservatives (such as octadecyldimethylbenzyl ammonium chloride; hexamethonium chloride; benzalkonium chloride; benzethonium chloride; phenol, butyl or benzyl alcohol; alkyl parabens such as methyl or propyl paraben; catechol; resorcinol; cyclohexanol; 3-pentanol; and m-cresol); low molecular weight (less than about 10 residues) polypeptides; proteins, such as serum albumin, gelatin, or immunoglobulins; hydrophilic polymers such as polyvinylpyrrolidone; amino acids such as glycine, glutamine, asparagine, histidine, arginine, or lysine; monosaccharides, disaccharides, and other carbohydrates including glucose, mannose, or dextrins; chelating agents such as EDTA; sugars such as sucrose, mannitol, trehalose or sorbitol; salt-forming counter-ions such as sodium; metal complexes (e.g. Zn-protein complexes); and/or non-ionic surfactants such as polyethylene glycol (PEG). Exemplary pharmaceutically acceptable carriers herein further include insterstitial drug dispersion agents such as soluble neutral-active hyaluronidase glycoproteins (sHASEGP), for example, human soluble PH-20 hyaluronidase glycoproteins, such as rHuPH20 (HYLENEX®, Baxter International, Inc.). Certain exemplary sHASEGPs and methods of use, including rHuPH20, are described in US Patent Publication Nos. 2005/0260186 and 2006/0104968.

[0176] Such formulations may contain more than one active ingredient as necessary for the particular indication being treated, preferably those with complementary activities that do not adversely affect each other and present in amounts that are effective for the purpose intended. For example, it may be desirable to further provide an additional therapeutic agent (e.g., a chemotherapeutic agent, a cytotoxic agent, a growth inhibitory agent, and/or an anti-hormonal agent).

[0177] Active ingredients may be entrapped in microcapsules prepared, for example, by coacervation techniques or by interfacial polymerization, for example, hydroxymethylcellulose or gelatin-microcapsules and poly-(methylmethacylate) microcapsules, respectively, in colloidal drug delivery systems (for example, liposomes, albumin microspheres, microemulsions, nano-particles and nanocapsules) or in macroemulsions. Such techniques are disclosed in Remington's Pharmaceutical Sciences 16th edition, Osol, A. Ed. (1980).

### EXAMPLES

### Example 1: Construction of Engineered pH-Dependent CD3 Libraries

[0178] Combinatorial histidine substitution libraries were derived from parental anti-CD3 antibody clone ADI-26906 (Antibody No. 1 of Table 1). ADI-26906 was initially disclosed in PCT/US2018/031705, which is hereby incorporated by reference herein in its entirety (ADI-26906 was not pH-engineered). Three library designs were utilized to incorporate histidines: 1) H3+L3 jumping double plus L1 single or double histidine (His) substitutions (with and without NNK variegation adjacent to His), resulting in a theoretical diversity of 3.4×10⁵; 2) pre-made HT/H2 diversity library plus H3 jumping doublet, resulting in a theoretical diversity of 6.8×10⁸, and 3) H3+L3 NNK/His or His/NNK walking singlet, resulting a theoretical diversity of 1.2×10⁵. The libraries were generated and propagated as described previously (see, e.g., WO2009036379; WO2010105256; WO2012009568; Xu et al., Protein Eng Des Sel. 2013 October; 26(10):663-70). L1 designs were synthesized as full VKs using SGI BioXp (SGI-DNA, La Jolla, Calif.). Substitutions were restricted to the CDRs. However, it is contemplated that substitutions may also be designed into the FRs. Sequence analysis of variants from each library showed a total of 0-6 His substitutions per variant VH or VK.

[0179] Five rounds of selections were performed using three libraries against biotinylated CD3 antigen. For the first round of selection for the H1/H2 plus H3 library, a magnetic bead sorting technique utilizing the Miltenyi MACS system was performed, essentially as described (Siegel et al., J Immunol Methods. 2004 March; 286(1-2):141-53). Briefly, ˜10⁹ yeast cells were incubated with 1 mL of 100 nM biotinylated CD3 antigen at pH 6.0 for 15 minutes at room temperature in FACS wash buffer PBS with 0.1% BSA at pH 6.0. After washing once with 50 mL ice-cold wash buffer, the cell pellet was resuspended in 40 mL wash buffer, and 500 μl Streptavidin MicroBeads (Miltenyi Biotec, Bergisch Gladbach, Germany. Cat #130-048-101) were added to the yeast and incubated for 15 minutes at 4° C. Next, the yeast were pelleted, resuspended in 5 ml wash buffer, and loaded onto a MACS LS column (Miltenyi Biotec, Bergisch Gladbach, Germany. Cat. #130-042-401). After the 5 mL was loaded, the column was washed three times with 3 ml FACS wash buffer. The column was then removed from the magnetic field, and the yeast were eluted with 5 mL of growth media and then grown overnight. For the two lower diversity libraries, the first round of selection was performed using flow cytometry (FACS). Briefly, yeast cells (˜109 yeast cells/library) were incubated with 0.25 mL of 100 nM biotinylated CD3 antigen at pH 6.0 for 15 minutes at room temperature in FACS wash buffer PBS with 0.1% BSA at pH 6.0. Yeast were washed with FACS buffer and labeled for sorting.

[0180] Subsequent to the first round of MACS or FACS, four rounds of sorting were performed using FACS and pH toggling selection methods (see, FIG. 1).

[0181] Purified CD3 protein antigen was biotinylated using the EZ-Link Sulfo-NHS-Biotinylation Kit (Thermo Scientific). CD3 antigens were concentrated to ˜1 mg/mL and buffer exchanged into PBS before addition of 1:7.5 molar ratio biotinylation reagent (EZ-Link Sulfo-NHS-Biotinylation Kit, Thermo Scientific, Cat #21425.). The mixture was held at 4° C. overnight prior to another buffer exchange to remove free biotin in the solution. Biotinylation was confirmed through Streptavidin sensor binding of the labeled proteins on a ForteBio. Successful biotinylation of the CD3 protein antigen was confirmed via detectable binding to a streptavidin-linked biosensor installed on ForteBio Octet™ Red384 Interferometer (Pall ForteBio, Menlo Park, Calif.) according to the manufacturer's guidelines (data not shown). In CD3 Pre-saturation Method #1 (shown in FIG. 1A), yeast cells were pre-saturated with native (un-biotinylated) CD3 antigen at pH 7.4 for 10 minutes. Next, yeast cells were washed at pH 7.4 and incubated in pH 6.0 media for 10 minutes to allow dissociation of antigen. Control cells were washed and incubated at pH 7.4. Lastly, yeast cells were incubated with biotinylated CD3 antigen (shown as a starred green circle in FIG. 1A) at pH 6 for 10 minutes. Control cells were incubated with biotinylated CD3 antigen at pH 7.4. Binders labeled at pH 6 were then sorted and characterized. In CD3 Pre-saturation Method #2 (shown in FIG. 1B), yeast cells were pre-saturated with native CD3 antigen at pH 6.0 for 10 minutes. Next, yeast cells were washed at pH 6.0 and incubated at either pH 7.4 or pH 6.0 for 10 minutes. Lastly, yeast cells were incubated with biotinylated CD3 antigen at the opposite pH (cells incubated at pH 6.0 in the previous step were incubated at pH 7.4, whereas cells incubated at pH 7.4 in the previous step were incubated at pH 6.0) for 10 minutes. Binders labeled with biotinylated CD3 antigen were then sorted and characterized.

[0182] The three libraries from the initial MACS/FACS selections were taken through four rounds of FACS selections. Approximately 1×10⁸ yeast per library were pelleted, washed three times with wash buffer, and incubated with 100 nM of biotinylated CD3 antigen separately for at least 10 minutes at room temperature at pH 6.0, pH 7.4, or processed through the pre-saturation and pH toggling of Method #2 discussed above. Yeast were then washed twice and stained with goat anti-human F(ab′)₂ kappa-FITC diluted 1:100 (Southern Biotech, Birmingham, Ala., Cat #2062-02) and either streptavidin-Alexa Fluor 633 (Life Technologies, Grand Island, N.Y., Cat #S21375) diluted 1:500, or Extravidin-phycoerthyrin (Sigma-Aldrich, St Louis, Cat #E4011) diluted 1:50, secondary reagents for 15 minutes at 4° C. After washing twice with ice-cold wash buffer, the cell pellets were resuspended in 0.4 mL wash buffer and transferred to strainer-capped sort tubes. Sorting was performed using a FACS ARIA sorter (BD Biosciences) and sort gates were determined to select either CD3 binders at pH 6 or non-binders at pH 7.4. The selected populations from the first round of FACS were brought forward into the next round.

[0183] The second, third, and fourth rounds of FACS for the above selected populations involved positive sorts for binders of CD3 at pH 6.0 and negative sorts to decrease pH 7.4 binders and polyspecific reagent binders (Xu et al., Protein Eng Des Sel. 2013 October; 26(10):663-70). In the second round of FACS (R3), cells were processed through the pre-saturation and pH toggling of Method #2 (discussed above) or negatively sorted to selected non-binders at pH 7.4. In the third round of FACS (R4), ouputs from R3 were pooled with the outputs from the CD3 pre-saturation Method #2 of R2 and subjected to CD3 pre-saturation Method #1. In the final round of FACS (R5), outputs from R4 were checked for PSR reactivity and for human and cynomolgus monkey (Cyno) CD3 binding at pH 6 and 7.4. The outputs of each round were plated and isolates were selected for sequencing and characterization.

[0184] FIG. 2 shows exemplary FACS plots from Round 1 and Round 2 selections from one library. Similar binding profiles were observed for all libraries. Briefly, during Round 1 cells were positively sorted using 100 nM human CD3εδ heterodimer (HuCD3-hd) at pH 6. During Round 2, cells were positively sorted using 100 nM HuCD3-hd at pH 6.0, negatively sorted using 100 nM HuCD3-hd at pH 7.4, or pre-saturated using Method #2 described above. Binding was also confirmed for cynomolgus CD3 (CyCD3-hd) at pH 6.0. Arrows indicate sorted cells that were carried forward to the next round of sorting.

[0185] FIG. 3 shows exemplary FACS plots from Round 3 and compares inputs of pH 6.0-positive sort and pH 7.4-negative sort from Round 2. Briefly, the sorts from Round 2 were incubated with 100 nM HuCD3-hd at pH 6.0 and 7.4. The Overlay column shows that the input cell population (from Round 2 sorts) exhibits higher binding at pH 6.0 compared to pH 7.4. The pre-saturation/toggle Method #2 was used to carry forward cells into the next rounds of selections.

[0186] FIG. 4 shows exemplary FACS plots from Round 4 and Round 5. Round 4 compared cells incubated in 100 nM HuCD3-hd at pH 6 and pH 7.4. Round 4 also compared cells subjected to the pre-saturation/toggling method at pH 6 and pH 7.4. Round 5 compared cells incubated in either 100 nM HuCD3-hd or 100 nM CyCD3-hd at pH 6 (red) and pH 7.4 (grey).

### Example 2: Determination of Anti-CD3 Antibody Affinity to CD3

[0187] Affinity of the anti-CD3 antibodies for CD3 at pH 6.0 and 7.4 was determined by measuring their kinetic constants (kₐ, k_{d}, K_{D}) on ForteBio Octet. ForteBio affinity measurements were performed generally as previously described (Estep et al., MAbs. 2013 5(2):270-8). Briefly, ForteBio affinity measurements were performed by loading antibodies (IgGs) on-line onto AHC sensors. Sensors were equilibrated off-line in assay buffer for 30 minutes and then monitored on-line for 60 seconds for baseline establishment. For avid binding measurement, sensors with loaded IgGs were exposed to 100 nM antigen (human or cyno CD3) for 3 minutes, afterwards they were transferred to assay buffer for 3 minutes for off-rate measurement. Kinetics data were fit using a 1:1 binding model in the data analysis software provided by ForteBio. Table 2 provides kinetic constants for selected clones. Table 3 provides equilibrium dissociation constant (K_{D}) for human CD3 at pH 6.0 and 7.4 for selected clones.

[0188] Specificity of the anti-CD3 antibodies for human CD3+ Jurkat cells compared to CHO-S cells at pH 6.0 and 7.4 was determined using a FACS cell binding assay. Briefly, CD3+ human Jurkat cells and CHO-S cells were thawed and washed with cold PBSF buffer, pH 7.4 (PBS+0.1% BSA, pH 7.4). About 200,000 cells were aliquoted per well of a 96-well plate and pelleted by centrifugation (5 minutes at 500×g). The cells were washed with either PBSF pH 7.4 or PBSF pH 6.0 (PBS+0.1% BSA, pH 6.0), and then resuspended in 100 ul in either PBSF pH 7.4 or PBSF pH 6.0 with IgG antibody produced in yeast (100 nM). The mixture (cells+antibody) was incubated for 20 minutes on ice, then washed twice with either PBSF pH 7.4 or PBSF pH 6.0. Cells were resuspended in 50 ul of propidium iodide (1:500 dilution) and anti-human IgG-RPE (1:100 dilution) prepared in either PBSF pH 7.4 or PBSF pH 6.0, then incubated for 20 minutes on ice in the dark before cells were washed twice with either PBSF pH 7.4 or PBSF pH 6.0. Binding was analyzed on FACS Canto II. Mean fluorescence intensities (MFI) at pH 6.0 and 7.4 are shown in Table 3 for selected clones.

[0189] FIG. 5A shows HuCD3 binding response at pH 6 (x-axis) compared to HuCD3 binding response at pH 7.4 (y-axis) for 236 unique clones from Round 2/3 sort outputs. FIG. 5B shows K_{D} values for HuCD3 at pH 6 (x-axis) compared to HuCD3 at pH 7.4 (y-axis) for the 236 unique clones from Round 2/3 sort outputs. Blue circles represent the Round 2/3 clones obtained via the pH 6.0 pre-saturation/toggle sort, yellow circles represent the Round 2/3 clones obtained via the pH 7.4 negative sort, and the red circles represent the parent clone ADI-26906. Results show that the pH 7.4 negative sorts at Round 2/3 tends to yield more pH selective binders but with weaker pH 6.0 response or affinity, which are designated as Group 2 binders. Positive selections at pH 6.0 and the pre-saturation/toggle sort yielded clones with a mix of selectivity but with higher response/affinity, which are designated as Group 1 binders.

[0190] Group 1 binders may include, e.g., ADI-48592 (Ab125), ADI-48595 (Ab178), ADI-48650 (Ab77), ADI-48652 (Ab81), ADI-48662 (Ab116), and ADI-48666 (Ab177). Group 2 binders may include, e.g., ADI-48588 (Ab58), ADI-48587 (Ab36), ADI-48577 (Ab193), ADI-48590 (Ab91), ADI-48581 (Ab237), ADI-48575 (Ab113), ADI-48593 (Ab158), ADI-48591 (Ab102), ADI-48647 (Ab65), ADI-48636 (Ab230), ADI-48586 (Ab25), ADI-48646 (Ab53), ADI-48638 (Ab22), ADI-48597 (Ab180), ADI-48601 (Ab191), ADI-48576 (Ab182), ADI-48643 (Ab46), ADI-48624 (Ab241), ADI-48632 (Ab15), ADI-48635 (Ab17), and ADI-48645 (Ab49).

[0191] FIG. 6 provides exemplary kinetics from the ForteBio experiments for four clones compared to parent clone ADI-26906. The K_{D} for each clone was calculated at pH 7.4 and pH 6.0. A ratio K_{D} was obtained by dividing the K_{D} at pH 7.4 by the K_{D} at pH 6.0. The examples demonstrate that some clones designated as Group 1 binders, such as SAD10318_P02_A05 (ADI-48595) and SAD10318_P02_C04 (ADI-48592), bound stronger (with a lower K_{D}) at pH 6.0 compared to pH 7.4. Some clones designated as Group 2 binders, such as SAD10318_P01_A03 (ADI-48587) and SAD10318_P01_E01 (ADI-48577), were non-binders at pH 7.4 but bound at pH 6.0. Amino acid substitutions in the CDRH3, CDRL1, and CDRL3 regions that may contribute to the differential binding are highlighted the Sequence column of FIG. 6 (SEQ ID NOS 576-590, respectively, in order of appearance). Table 2 provides additional kinetics and PSR data for selected clones. Clones such as ADI-48576, ADI-48577, ADI-48587, ADI-48592, ADI-48595, ADI-48635, ADI-48650, ADI-48652, ADI-48666, ADI-48643, and ADI-48645 exhibit pH-dependent binding (with stronger binding at pH 6.0 relative to binding at pH 7.4), low PSR scores, and provide a range of affinities for CD3.

[0192] Analysis of 258 unique clones identified using methodology of the present disclosure revealed consensus motifs within CDR regions. In some embodiments, the disclosure provides an antibody comprising a CDRH3 binding domain comprising a consensus motif, the consensus motif comprising the sequence AX₁DX₂YX₃HX₄FYDV, wherein X₁ is R or H, wherein X₂ is A or H, wherein X₃ is G, H, or P, and wherein X₄ is Y, H, D, V, E, S, N, L, M, I, G, A, Q, or T (SEQ ID NO: 1). In some embodiments, at least one of X₁, X₂, X₃, and X₄ is H. The following 120 clones include this sequence motif: SAD10318_P01_A02; SAD10318_P01_G02; SAD10318_P01_D03; SAD10318_P01_G03; SAD10318_P01_H03; SAD10318_P02_D05; SAD10318_P02_H05; SAD10318_P02_G06; SAD10318_P03_C08; SAD10318_P03_H08; SAD10318_P03_G09; SAD10318_P04_H10; SAD10318_P04_D11; SAD10319_P01_A01; SAD10319_P01_C01; SAD10319_P01_E01; SAD10319_P01_A02; SAD10319_P01_C02; SAD10319_P01_F02; SAD10319_P01_H02; SAD10319_P01_B03; SAD10319_P01_C03; SAD10319_P01_D03; SAD10319_P01_F03; SAD10319_P02_A04; SAD10319_P02_C04; SAD10319_P02_E04; SAD10319_P02_F04; SAD10319_P02_A05; SAD10319_P02_B05; SAD10319_P02_C05; SAD10319_P02_G05; SAD10319_P02_A06; SAD10319_P02_B06; SAD10319_P02_C06; SAD10319_P02_D06; SAD10319_P02_F06; SAD10319_P02_G06; SAD10319_P03_C07; SAD10319_P03_H07; SAD10319_P03_D08; SAD10319_P03_E08; SAD10319_P03_E09; SAD10319_P03_F09; SAD10319_P04_A10; SAD10319_P04_G10; SAD10319_P04_E11; SAD10319_P04_F11; SAD10319_P04_G11; SAD10319_P04_C12; SAD10319_P04_D12; SAD10320_P01_B01; SAD10320_P01_D01; SAD10320_P01_E01; SAD10320_P01_G01; SAD10320_P01_H01; SAD10320_P01_A02; SAD10320_P01_F02; SAD10320_P01_G02; SAD10320_P01_H02; SAD10320_P01_C03; SAD10320_P01_D03; SAD10320_P01_E03; SAD10320_P01_F03; SAD10320_P01_G03; SAD10320_P02_A04; SAD10320_P02_B04; SAD10320_P02_E04; SAD10320_P02_H04; SAD10320_P02_A05; SAD10320_P02_B05; SAD10320_P02_C05; SAD10320_P02_B06; SAD10320_P02_D06; SAD10320_P02_E06; SAD10320_P03_B07; SAD10320_P03_H07; SAD10320_P03_C08; SAD10320_P03_D08; SAD10320_P03_F08; SAD10320_P03_H08; SAD10320_P03_A09; SAD10320_P03_C09; SAD10320_P03_D09; SAD10320_P03_F09; SAD10320_P04_A10; SAD10320_P04_C10; SAD10320_P04_D10; SAD10320_P04_E10; SAD10320_P04_G10; SAD10320_P04_D11; SAD10320_P04_E11; SAD10320_P04_F11; SAD10320_P04_H11; SAD10320_P04_A12; SAD10320_P04_D12; SAD10320_P04_E12; SAD10320_P04_F12; SAD10319_P05_A01; SAD10319_P05_A05; SAD10319_P05_B02; SAD10319_P05_C01; SAD10319_P05_C03; SAD10319_P05_C05; SAD10319_P05_D02; SAD10319_P05_D03; SAD10319_P05_D05; SAD10319_P05_E04; SAD10319_P05_F01; SAD10319_P06_B10; SAD10319_P06_B11; SAD10319_P06_C10; SAD10319_P06_C12; SAD10319_P06_E08; SAD10319_P06_F07; SAD10319_P06_F10; SAD10319_P06_G09; SAD10319_P06_H07; SAD10319_P06_H08; and SAD10319_P06_H10.

[0193] In some embodiments, the disclosure provides an antibody comprising a CDRH3 binding domain comprising a consensus motif, the consensus motif comprising the sequence ARDX₁YGX₂X₃X₄YDX₅ wherein X₁ is A or H, wherein X₂ is R or H, wherein X₃ is H or Y, wherein X₄ is F or H, and wherein X₅ is H or V (SEQ ID NO: 2). In some embodiments, at least one of X₁, X₂, X₃, X₄, and X₅ is H. The following 57 clones include this consensus motif: LAD5224_P03_A01; SAD10318_P01_B01; SAD10318_P01_F01; SAD10318_P02_B05; SAD10318_P02_F05; SAD10318_P02_G05; SAD10318_P03_B07; SAD10318_P03_G07; SAD10318_P03_A08; SAD10318_P03_A09; SAD10318_P04_E10; SAD10318_P04_E11; SAD10318_P04_H11; SAD10319_P01_D01; SAD10319_P01_F01; SAD10319_P01_G01; SAD10319_P01_D02; SAD10319_P01_E02; SAD10319_P02_B04; SAD10319_P02_E05; SAD10319_P02_E06; SAD10319_P02_H06; SAD10319_P03_G08; SAD10319_P03_B09; SAD10319_P03_G09; SAD10319_P04_B10; SAD10319_P04_C11; SAD10319_P04_D11; SAD10319_P04_F12; SAD10319_P04_H12; SAD10320_P01_E02; SAD10320_P02_C04; SAD10320_P02_C06; SAD10320_P02_G06; SAD10319_P05_A02; SAD10319_P05_B03; SAD10319_P05_B04; SAD10319_P05_D01; SAD10319_P05_G02; SAD10319_P05_G03; SAD10319_P05_H06; SAD10319_P06_A07; SAD10319_P06_A10; SAD10319_P06_A11; SAD10319_P06_E09; SAD10319_P06_E10; SAD10319_P06_G11; SAD10319_P06_H11; LAD9953_P01_H01; LAD9954_P01_B02; LAD9955_P01_G02; LAD9956_P01_C03; LAD9959_P01_E04; LAD9960_P01_D05; LAD9963_P01_E06; LAD9964_P01_C07; and LAD9966_P01_A08.

[0194] In some embodiments, the disclosure provides an antibody comprising a CDRH3 binding domain comprising a consensus motif, the consensus motif comprising the sequence ARDAHX₁X₂YX₃X₄DX₅, wherein X₁ is G, E, or R, wherein X₂ is R or H, wherein X₃ is F or H, wherein X₄ is Y or H, and wherein X₅ is V or H (SEQ ID NO: 3). In some embodiments, at least one of X₁, X₂, X₃, X₄, and X₅ is H. The following 23 clones include this consensus motif: SAD10318_P01_G01; SAD10318_P01_F02; SAD10318_P01_C03; SAD10318_P01_E03; SAD10318_P01_F03; SAD10318_P02_B04; SAD10318_P02_D04; SAD10318_P02_D06; SAD10318_P03_F07; SAD10318_P04_F11; SAD10318_P04_H12; SAD10319_P02_D04; SAD10319_P02_H04; SAD10319_P02_D05; SAD10319_P03_G07; SAD10319_P04_C10; SAD10319_P04_B11; SAD10319_P04_B12; SAD10320_P02_A06; SAD10319_P05_A03; SAD10319_P05_B05; SAD10319_P05_G04; and SAD10319_P06_D12.

[0195] In some embodiments, the disclosure provides an antibody comprising a CDRH3 binding domain comprising a consensus motif, the consensus motif comprising the sequence ARDAX₁HRX₂FYDV, wherein X₁ is H, Y, S, G, A, T, V, or R, and wherein X₂ is Y or H (SEQ ID NO: 4). In some embodiments, at least one of X₁ and X₂ is H. The following 19 clones include this consensus motif: SAD10318_P01_E01; SAD10318_P01_H01; SAD10318_P01_D02; SAD10318_P02_C04; SAD10318_P02_C05; SAD10318_P02_B06; SAD10318_P02_E06; SAD10318_P03_D09; SAD10318_P04_A12; SAD10319_P02_F05; SAD10319_P03_H08; SAD10320_P01_F01; SAD10320_P01_C02; SAD10320_P01_H03; SAD10320_P02_D05; SAD10320_P02_H05; SAD10320_P03_E07; SAD10320_P04_A11; and SAD10319_P05_G01.

[0196] In some embodiments, the disclosure provides an antibody comprising a CDRH3 binding domain comprising a consensus motif, the consensus motif comprising the sequence ARDX₁YHRYFYDX₂, wherein X₁ is H or A, and wherein X₂ is H, V, or M (SEQ ID NO: 5). In some embodiments, at least one of X₁ and X₂ is H. The following 15 clones include this consensus motif: SAD10318_P01_D01; SAD10318_P01_B02; SAD10318_P01_A03; SAD10318_P02_H04; SAD10318_P02_A05; SAD10318_P03_E07; SAD10318_P03_B08; SAD10318_P03_D08; SAD10318_P03_E08; SAD10318_P03_F08; SAD10318_P03_G08; SAD10318_P03_C09; SAD10318_P04_B11; SAD10319_P01_H01; and SAD10319_P04_E12.

[0197] In some embodiments, the disclosure provides an antibody comprising a CDRH3 binding domain comprising a consensus motif, the consensus motif comprising the sequence AX₁DAYX₂X₃X₄HX₅DV, wherein X₁ is R or H, wherein X₂ is G or H, wherein X₃ is H or R, wherein X₄ is N, F, or Y, and wherein X₅ is Y or H (SEQ ID NO: 6). In some embodiments, at least one of X₁, X₂, X₃, X₄, and X₅ is H. The following 14 clones include this consensus motif: SAD10318_P01_C01; SAD10318_P02_G04; SAD10318_P03_E09; SAD10318_P03_F09; SAD10318_P04_C10; SAD10318_P04_D10; SAD10318_P04_F10; SAD10318_P04_G11; SAD10318_P04_G12; SAD10320_P02_F05; SAD10320_P02_F06; SAD10320_P02_H06; SAD10320_P04_F10; and SAD10319_P05_D04.

[0198] In some embodiments, the disclosure provides an antibody comprising a CDRH3 binding domain comprising a consensus motif, the consensus motif comprising the sequence ARDX₁X₂GRYFYDV, wherein X₁ is M, Q, or H, and wherein X₂ is R or H (SEQ ID NO: 7). In some embodiments, at least one of X₁ and X₂ is H. The following 7 clones include this sequence motif: SAD10318_P02_E04; SAD10318_P04_C11; SAD10318_P04_F12; SAD10319_P02_H05; SAD10320_P01_A03; SAD10320_P01_B03; and SAD10320_P02_E05.

[0199] In some embodiments, the disclosure provides an antibody comprising a CDRH3 binding domain comprising a consensus motif, the consensus motif comprising the sequence ARDX₁X₂X₃RYFYDX₄, wherein X₁ is H or A, wherein X₂ is T, Y, or H, wherein X₃ is G or H, and wherein X₄ is V or H (SEQ ID NO: 8). In some embodiments, at least one of X₁, X₂, X₃, and X₄ is H. The following clones include this sequence motif: ADI-26906; ADI-48584; ADI-57317; ADI-57319; ADI-57323; ADI-57328; ADI-48639; ADI-57300; ADI-57333; ADI-57336; ADI-57337; ADI-48587; ADI-57343; ADI-48648; ADI-48650; ADI-48589; ADI-48652; ADI-48654; ADI-48592; ADI-57401; ADI-57406; ADI-57274; ADI-57413; ADI-57414; ADI-57415; ADI-57416; ADI-57417; ADI-57275; ADI-57427; ADI-57428; ADI-57437; ADI-57438; ADI-48594; ADI-57439; ADI-57440; ADI-57441; ADI-57442; ADI-57443; ADI-57444; ADI-57445; ADI-48666; ADI-48595; ADI-48597; ADI-48576; ADI-57277; ADI-57279; ADI-57280; ADI-57281; ADI-48601; ADI-48577; ADI-57284; ADI-48604; ADI-48606; ADI-57285; ADI-48608; ADI-48609; ADI-48610; ADI-48614; ADI-48615; ADI-48617; ADI-57295; ADI-48580; ADI-48622; ADI-57299; ADI-57300; ADI-48623; ADI-57303; ADI-48582; and ADI-57311.

[0200] In some embodiments, the disclosure provides an antibody comprising a CDRH3 binding domain comprising a consensus motif, the consensus motif comprising the sequence ARDX₁X₂X₃X₄YFYDX₅, wherein X₁ is H or A, wherein X₂ is T, Y, or H, wherein X₃ is G or H, X₄ is H, R, V, or I, and wherein X₅ is V or H (SEQ ID NO: 43). In some embodiments, at least one of X₁, X₂, X₃, X₄, and X₅ is H. The following 11 clones include this consensus motif: ADI-48576; ADI-48577; ADI-48587; ADI-48592; ADI-48595; ADI-48635; ADI-48650; ADI-48652; ADI-48666; ADI-48643; and ADI-48645.

[0201] In some embodiments, the disclosure provides an antibody comprising a CD3 binding domain, CDRH3, wherein the CDRH3 binding domain comprises a consensus motif, the consensus motif comprising the sequence AX₁DX₂X₃X₄X₅X₆X₇X₈DX₉, wherein X₁ is R or H, wherein X₂ is A, H, M, or Q, wherein X₃ is Y, H, S, G, A, T, V, or R; wherein X₄ is G, H, P, E, or R; wherein X₅ is H or R, wherein X₆ is Y, N, F, H, D, E, S, L, M, I, G, A, Q, or T; wherein X₇ is F or H; wherein X₈ is Y or H; and wherein X₉ is V, H, or M (SEQ ID NO: 58). In some embodiments, at least one of X₁, X₂, X₃, X₄, X₅, X₆, X₇, X₈, and X₉ is H. The following clones include this sequence motif: SAD10318_P01_A02; SAD10318_P01_G02; SAD10318_P01_D03; SAD10318_P01_G03; SAD10318_P01_H03; SAD10318_P02_D05; SAD10318_P02_H05; SAD10318_P02_G06; SAD10318_P03_C08; SAD10318_P03_H08; SAD10318_P03_G09; SAD10318_P04_H10; SAD10318_P04_D11; SAD10319_P01_A01; SAD10319_P01_C01; SAD10319_P01_E01; SAD10319_P01_A02; SAD10319_P01_C02; SAD10319_P01_F02; SAD10319_P01_H02; SAD10319_P01_B03; SAD10319_P01_C03; SAD10319_P01_D03; SAD10319_P01_F03; SAD10319_P02_A04; SAD10319_P02_C04; SAD10319_P02_E04; SAD10319_P02_F04; SAD10319_P02_A05; SAD10319_P02_B05; SAD10319_P02_C05; SAD10319_P02_G05; SAD10319_P02_A06; SAD10319_P02_B06; SAD10319_P02_C06; SAD10319_P02_D06; SAD10319_P02_F06; SAD10319_P02_G06; SAD10319_P03_C07; SAD10319_P03_H07; SAD10319_P03_D08; SAD10319_P03_E08; SAD10319_P03_E09; SAD10319_P03_F09; SAD10319_P04_A10; SAD10319_P04_G10; SAD10319_P04_E11; SAD10319_P04_F11; SAD10319_P04_G11; SAD10319_P04_C12; SAD10319_P04_D12; SAD10320_P01_B01; SAD10320_P01_D01; SAD10320_P01_E01; SAD10320_P01_G01; SAD10320_P01_H01; SAD10320_P01_A02; SAD10320_P01_F02; SAD10320_P01_G02; SAD10320_P01_H02; SAD10320_P01_C03; SAD10320_P01_D03; SAD10320_P01_E03; SAD10320_P01_F03; SAD10320_P01_G03; SAD10320_P02_A04; SAD10320_P02_B04; SAD10320_P02_E04; SAD10320_P02_H04; SAD10320_P02_A05; SAD10320_P02_B05; SAD10320_P02_C05; SAD10320_P02_B06; SAD10320_P02_D06; SAD10320_P02_E06; SAD10320_P03_B07; SAD10320_P03_H07; SAD10320_P03_C08; SAD10320_P03_D08; SAD10320_P03_F08; SAD10320_P03_H08; SAD10320_P03_A09; SAD10320_P03_C09; SAD10320_P03_D09; SAD10320_P03_F09; SAD10320_P04_A10; SAD10320_P04_C10; SAD10320_P04_D10; SAD10320_P04_E10; SAD10320_P04_G10; SAD10320_P04_D11; SAD10320_P04_E11; SAD10320_P04_F11; SAD10320_P04_H11; SAD10320_P04_A12; SAD10320_P04_D12; SAD10320_P04_E12; SAD10320_P04_F12; SAD10319_P05_A01; SAD10319_P05_A05; SAD10319_P05_B02; SAD10319_P05_C01; SAD10319_P05_C03; SAD10319_P05_C05; SAD10319_P05_D02; SAD10319_P05_D03; SAD10319_P05_D05; SAD10319_P05_E04; SAD10319_P05_F01; SAD10319_P06_B10; SAD10319_P06_B11; SAD10319_P06_C10; SAD10319_P06_C12; SAD10319_P06_E08; SAD10319_P06_F07; SAD10319_P06_F10; SAD10319_P06_G09; SAD10319_P06_H07; SAD10319_P06_H08; SAD10319_P06_H10; LAD5224_P03_A01; SAD10318_P01_B01; SAD10318_P01_F01; SAD10318P02_B05; SAD10318_P02_F05; SAD10318_P02 G05; SAD10318_P03_B07; SAD10318_P03_G07; SAD10318_P03_A08; SAD10318_P03_A09; SAD10318_P04_E10; SAD10318_P04_E11; SAD10318_P04_H11; SAD10319_P01_D01; SAD10319_P01_F01; SAD10319_P01_G01; SAD10319_P01_D02; SAD10319_P01_E02; SAD10319_P02_B04; SAD10319_P02_E05; SAD10319_P02_E06; SAD10319_P02_H06; SAD10319_P03_G08; SAD10319_P03_B09; SAD10319_P03_G09; SAD10319_P04_B10; SAD10319_P04_C11; SAD10319_P04_D11; SAD10319_P04_F12; SAD10319_P04_H12; SAD10320_P01_E02; SAD10320_P02_C04; SAD10320_P02_C06; SAD10320_P02_G06; SAD10319_P05_A02; SAD10319_P05_B03; SAD10319_P05_B04; SAD10319_P05_D01; SAD10319_P05_G02; SAD10319_P05_G03; SAD10319_P05_H06; SAD10319_P06_A07; SAD10319_P06_A10; SAD10319_P06_A11; SAD10319_P06_E09; SAD10319_P06_E10; SAD10319_P06_G11; SAD10319_P06_H11; LAD9953_P01_H01; LAD9954_P01_B02; LAD9955_P01_G02; LAD9956_P01_C03; LAD9959_P01_E04; LAD9960_P01_D05; LAD9963_P01_E06; LAD9964_P01_C07; LAD9966_P01_A08; SAD10318_P01_01; SAD10318_P01_F02; SAD10318_P01_C03; SAD10318_P01_E03; SAD10318_P01_F03; SAD10318_P02_B04; SAD10318_P02_D04; SAD10318_P02_D06; SAD10318_P03_F07; SAD10318_P04_F11; SAD10318_P04_H12; SAD10319_P02_D04; SAD10319_P02_H04; SAD10319_P02_D05; SAD10319_P03_G07; SAD10319_P04_C10; SAD10319_P04_B11; SAD10319_P04_B12; SAD10320_P02_A06; SAD10319_P05_A03; SAD10319_P05_B05; SAD10319_P05_G04; SAD10319_P06_D12; SAD10318_P01_E01; SAD10318_P01_H01; SAD10318_P01_D02; SAD10318_P02_C04; SAD10318_P02_C05; SAD10318_P02_B06; SAD10318_P02_E06; SAD10318_P03_D09; SAD10318_P04_A12; SAD10319_P02_F05; SAD10319_P03_H08; SAD10320_P01_F01; SAD10320_P01_C02; SAD10320_P01_H03; SAD10320_P02_D05; SAD10320_P02_H05; SAD10320_P03_E07; SAD10320_P04_A11; SAD10319_P05_G01; SAD10318_P01_D01; SAD10318_P01_B02; SAD10318_P01_A03; SAD10318_P02_H04; SAD10318_P02_A05; SAD10318_P03_E07; SAD10318_P03_B08; SAD10318_P03_D08; SAD10318_P03_E08; SAD10318_P03_F08; SAD10318_P03_G08; SAD10318_P03_C09; SAD10318_P04_B11; SAD10319_P01_H01; SAD10319_P04_E12; SAD10318_P01_D01; SAD10318_P01_B02; SAD10318_P01_A03; SAD10318_P02_H04; SAD10318_P02_A05; SAD10318_P03_E07; SAD10318_P03_B08; SAD10318_P03_D08; SAD10318_P03_E08; SAD10318_P03_F08; SAD10318_P03_G08; SAD10318_P03_C09; SAD10318_P04_B11; SAD10319_P01_H01; SAD10319_P04_E12; SAD10318_P02_E04; SAD10318_P04_C11; SAD10318_P04_F12; SAD10319_P02_H05; SAD10320_P01_A03; SAD10320_P01_B03; SAD10320_P02_E05; ADI-26906; ADI-48584; ADI-57317; ADI-57319; ADI-57323; ADI-57328; ADI-48639; ADI-57300; ADI-57333; ADI-57336; ADI-57337; ADI-48587; ADI-57343; ADI-48648; ADI-48650; ADI-48589; ADI-48652; ADI-48654; ADI-48592; ADI-57401; ADI-57406; ADI-57274; ADI-57413; ADI-57414; ADI-57415; ADI-57416; ADI-57417; ADI-57275; ADI-57427; ADI-57428; ADI-57437; ADI-57438; ADI-48594; ADI-57439; ADI-57440; ADI-57441; ADI-57442; ADI-57443; ADI-57444; ADI-57445; ADI-48666; ADI-48595; ADI-48597; ADI-48576; ADI-57277; ADI-57279; ADI-57280; ADI-57281; ADI-48601; ADI-48577; ADI-57284; ADI-48604; ADI-48606; ADI-57285; ADI-48608; ADI-48609; ADI-48610; ADI-48614; ADI-48615; ADI-48617; ADI-57295; ADI-48580; ADI-48622; ADI-57299; ADI-57300; ADI-48623; ADI-57303; ADI-48582; and ADI-57311.

[0202] In some embodiments, the disclosure provides an antibody comprising a CDRH3 binding domain comprising a consensus motif, the consensus motif comprising the sequence ARDAX₁X₂X₃X₄FYDX₅, wherein X₁ is T, H, or Y, wherein X₂ is G or H, wherein X₃ is H or R, wherein X₄ is V or Y, and wherein X₅ is V or H (SEQ ID NO: 593). In some embodiments, at least one of X₁, X₂, X₃, and X₅ is H. At least the following 6 clones include this consensus motif and are designated as Group 1 binders: ADI-48592, ADI-48595, ADI-48650, ADI-48652, ADI-48662, and ADI-48666.

[0203] In some embodiments, the disclosure provides an antibody comprising a CDRH3 binding domain comprising a consensus motif, the consensus motif comprising the sequence AX₁DX₂X₃X₄X₅X₆X₇YDX₈, wherein X₁ is R or H, wherein X₂ is H or A, wherein X₃ is H or Y, wherein X₄ is H, G, or P, wherein X₅ is R or H, wherein X₆ is Y, I, or V, wherein X₇ is F or H, and wherein X₈ is V or H (SEQ ID NO: 596). In some embodiments, at least one of X₁, X₂, X₃, X₄, X₅, X₇, and X₈ is H. At least the following 21 clones include this consensus motif and are designated as Group 2 binders: ADI-48588, ADI-48587, ADI-48577, ADI-48590, ADI-48581, ADI-48575, ADI-48593, ADI-48591, ADI-48647, ADI-48636, ADI-48586, ADI-48646, ADI-48638, ADI-48597, ADI-48601, ADI-48576, ADI-48643, ADI-48624, ADI-48632, ADI-48635, and ADI-48645.

[0204] In some embodiments, the disclosure provides an antibody comprising a CDRH2 binding domain comprising a consensus motif, the consensus motif comprising the sequence WIDLENANTIYDAKFQG (SEQ ID NO: 9). The following 148 clones include this consensus motif: LAD5224_P03_A01; SAD10318_P01_B01; SAD10318_P01_C01; SAD10318_P01_D01; SAD10318_P01_E01; SAD10318_P01_F01; SAD10318_P01_G01; SAD10318_P01_H01; SAD10318_P01_A02; SAD10318_P01_B02; SAD10318_P01_D02; SAD10318_P01_F02; SAD10318_P01_G02; SAD10318_P01_A03; SAD10318_P01_C03; SAD10318_P01_D03; SAD10318_P01_E03; SAD10318_P01_F03; SAD10318_P01_03; SAD10318_P01_H03; SAD10318_P02_B04; SAD10318_P02_C04; SAD10318_P02_D04; SAD10318_P02_E04; SAD10318_P02 G04; SAD10318_P02_H04; SAD10318_P02_A05; SAD10318_P02_B05; SAD10318_P02_C05; SAD10318_P02_D05; SAD10318_P02_F05; SAD10318_P02_G05; SAD10318_P02_H05; SAD10318_P02_B06; SAD10318_P02_D06; SAD10318_P02_E06; SAD10318_P02_G06; SAD10318_P03_B07; SAD10318_P03_E07; SAD10318_P03_F07; SAD10318_P03 G07; SAD10318_P03_A08; SAD10318_P03_B08; SAD10318_P03_C08; SAD10318_P03_D08; SAD10318_P03_E08; SAD10318_P03_F08; SAD10318_P03_G08; SAD10318_P03_H08; SAD10318_P03_A09; SAD10318_P03_C09; SAD10318_P03_D09; SAD10318_P03_E09; SAD10318_P03_F09; SAD10318_P03 G09; SAD10318_P04_C10; SAD10318_P04_D10; SAD10318_P04_E10; SAD10318_P04_F10; SAD10318_P04_H10; SAD10318_P04_A11; SAD10318_P04_B11; SAD10318_P04_C11; SAD10318_P04_D11; SAD10318_P04_E11; SAD10318_P04_F11; SAD10318_P04_G11; SAD10318_P04_H11; SAD10318_P04_A12; SAD10318_P04_F12; SAD10318_P04 G12; SAD10318_P04_H12; SAD10320_P01_B01; SAD10320_P01_D01; SAD1032_P01_E01; SAD10320_P01_F01; SAD10320_P01_G01; SAD10320_P01_H01; SAD10320_P01_A02; SAD10320_P01_C02; SAD10320_P01_E02; SAD10320_P01_F02; SAD10320_P01_G02; SAD10320_P01_H02; SAD10320_P01_A03; SAD10320_P01_B03; SAD10320_P01_C03; SAD10320_P01_D03; SAD10320_P01_E03; SAD10320_P01_F03; SAD10320_P01_G03; SAD10320_P01_H03; SAD10320_P02_A04; SAD10320_P02_B04; SAD10320_P02_C04; SAD10320_P02_E04; SAD10320_P02_H04; SAD10320_P02_A05; SAD10320_P02_B05; SAD10320_P02_C05; SAD10320_P02_D05; SAD10320_P02_E05; SAD10320_P02_F05; SAD10320_P02_H05; SAD10320_P02_A06; SAD10320_P02_B06; SAD10320_P02_C06; SAD10320_P02_D06; SAD10320_P02_E06; SAD10320_P02_F06; SAD10320_P02_G06; SAD10320_P02_H06; SAD10320_P03_B07; SAD10320_P03_E07; SAD10320_P03_H07; SAD10320_P03_C08; SAD10320_P03_D08; SAD10320_P03_F08; SAD10320_P03_H08; SAD10320_P03_A09; SAD10320_P03_C09; SAD10320_P03_D09; SAD10320_P03_F09; SAD10320_P04_A10; SAD10320_P04_C10; SAD10320_P04_D10; SAD10320_P04_E10; SAD10320_P04_F10; SAD10320_P04_G10; SAD10320_P04_A11; SAD10320_P04_D11; SAD10320_P04_E11; SAD10320_P04_F11; SAD10320_P04_G11; SAD10320_P04_H11; SAD10320_P04_A12; SAD10320_P04_D12; SAD10320_P04_E12; SAD10320_P04_F12; LAD9953_P01_H01; LAD9954_P01_B02; LAD9955_P01_G02; LAD9956_P01_C03; LAD9959_P01_E04; LAD9960_P01_D05; LAD9963_P01_E06; LAD9964_P01_C07; and LAD9966_P01_A08. Additionally, at least the following 16 clones include this consensus motif and are designated as Group 2 binders: ADI-48575, ADI-48576, ADI-48577, ADI-48581, ADI-48586, ADI-48587, ADI-48588, ADI-48590, ADI-48591, ADI-48593, ADI-48601, ADI-48646, ADI-48647, ADI-48597, ADI-48643, and ADI-48645.

[0205] In some embodiments, the disclosure provides an antibody comprising a CDRH2 binding domain comprising a consensus motif, the consensus motif comprising the sequence X₁INPX₂TGX₃TX₄YSQKFQG, wherein X₁ is W or Y, wherein X₂ is A, S, D, G, N, L, V, H, or Q, wherein X₃ is A, T, or S, and wherein X₄ is K, V, T, D, Y, F, or A (SEQ ID NO: 10). In some embodiments, at least one of X₁, X₂, X₃, and X₄ is H. The following 24 clones include this consensus motif: SAD10319_P01_E02; SAD10319_P01_H02; SAD10319_P01_B03; SAD10319_P02_A04 SAD10319_P02_B04; SAD10319_P02_C04; SAD10319_P02_F04; SAD10319_P02_H04; SAD10319_P02_A05; SAD10319_P02_C05; SAD10319_P02_C06; SAD10319_P02_E06; SAD10319_P02_F06; SAD10319_P02_G06; SAD10319_P03_D08; SAD10319_P03_F09; SAD10319_P04_G10; SAD10319_P04_C11; SAD10319_P05_A01; SAD10319_P05_A05; SAD10319_P05_G03; SAD10319_P06_A10; SAD10319_P06_C12; and SAD10319_P06_E09.

[0206] In some embodiments, the disclosure provides an antibody comprising a CDRH2 binding domain comprising a consensus motif, the consensus motif comprising the sequence X₁IX₂AGTGX₃TX₄YSQKFQG, wherein X₁ is W, Y, or F, wherein X₂ is T, N, or D, wherein X₃ is A, T, or L, and wherein X₄ is A, K, V, H, T, or N (SEQ ID NO: 11). In some embodiments, at least one of X₁, X₂, X₃, and X₄ is H. The following 23 clones include this consensus motif: SAD10319_P01_E01; SAD10319_P01_G01; SAD10319_P01_D02; SAD10319_P01_D03; SAD10319_P02_E05; SAD10319_P02_A06; SAD10319_P03_C07; SAD10319_P03_G07; SAD10319_P03_B09; SAD10319_P03_E09; SAD10319_P04_A10; SAD10319_P04_B10; SAD10319_P04_B11; SAD10319_P04_E12; SAD10319_P05_A02; SAD10319_P05_C05; SAD10319_P05_D01; SAD10319_P05_H06; SAD10319_P06_A07; SAD10319_P06_B11; SAD10319_P06_F07; SAD10319_P06_G09; and SAD10319_P06_H08.

[0207] In some embodiments, the disclosure provides an antibody comprising a CDRH2 binding domain comprising a consensus motif, the consensus motif comprising the sequence X₁IDAGTGX₂TX₃YSQKFQG, wherein X₁ is S or W, wherein X₂ is L, N, D, or F, and wherein X₃ is D, Y, or K (SEQ ID NO: 12). In some embodiments, at least one of X₁, X₂, and X₃ is H. The following 17 clones include this consensus motif: SAD10319_P01_C01; SAD10319_P01_D01; SAD10319_P01_H01; SAD10319_P01_F02; SAD10319_P02_D04; SAD10319_P02_D05; SAD10319_P02_F05; SAD10319_P02_H06; SAD10319_P03_G08; SAD10319_P04_D11; SAD10319_P05_A03; SAD10319_P05_B05; SAD10319_P05_C01; SAD10319_P05_D03; SAD10319_P05_F01; SAD10319_P05_G01; and SAD10319_P06_H10.

[0208] In some embodiments, the disclosure provides an antibody comprising a CDRH2 binding domain comprising a consensus motif, the consensus motif comprising the sequence X₁IX₂AGTGATX₃YSQKFQG, wherein X₁ is G, D, or S, wherein X₂ is I or D, and wherein X₃ is K or D (SEQ ID NO: 13). In some embodiments, at least one of X₁, X₂, and X₃ is H. The following 7 clones include this consensus motif: SAD10319_P02_G05; SAD10319_P05_B02; SAD10319_P05_C03; SAD10319_P05_D05; SAD10319_P06_B10; SAD10319_P06_C10; and SAD10319_P06_D12.

[0209] In some embodiments, the disclosure provides an antibody comprising a CDRH2 binding domain comprising a consensus motif, the consensus motif comprising the sequence WINPX₁TGNTX₂YSQKFQG, wherein X₁ is D, T, L, S, or A, and wherein X₂ is D, V, L, or N (SEQ ID NO: 14). In some embodiments, at least one of X₁ and X₂ is H. The following 6 clones include this consensus motif: SAD10319_P01_A01; SAD10319_P01_F01; SAD10319_P01_C02; SAD10319_P04_F12; SAD10319_P05_E04; and SAD10319_P06_A11.

[0210] In some embodiments, the disclosure provides an antibody comprising a CDRH2 binding domain comprising a consensus motif, the consensus motif comprising the sequence X₁INAGTGX₂TX₃YSQKFQG, wherein X₁ is Y or W, wherein X₂ is N, D, or A, and wherein X₃ is I or V (SEQ ID NO: 15). In some embodiments, at least one of X₁, X₂, and X₃ is H. The following 5 clones include this consensus motif: SAD10319_P01_F03; SAD10319_P02_H05; SAD10319_P02_D06; SAD10319_P03_E08; and SAD10319_P03_H08.

[0211] In some embodiments, the disclosure provides an antibody comprising a CDRH2 binding domain comprising a consensus motif, the consensus motif comprising the sequence X₁INPX₂TGX₃TKYSQKFQG, wherein X₁ is W or Y, wherein X₂ is D, I or Y, and wherein X₃ is D, Y, or E (SEQ ID NO: 16). In some embodiments, at least one of X₁, X₂, and X₃ is H. The following 5 clones include this consensus motif: SAD10319_P03_H07; SAD10319_P04_E11; SAD10319_P04_F11; SAD10319_P04_B12; and SAD10319_P04_D12.

[0212] In some embodiments, the disclosure provides an antibody comprising a CDRH2 binding domain comprising a consensus motif, the consensus motif comprising the sequence SIX₁AGTGX₂TKYSQKFQG, wherein X₁ is N or V, and wherein X₂ is A or I (SEQ ID NO: 17). In some embodiments, at least one of X₁ and X₂ is H. The following 3 clones include this consensus motif: SAD10319_P02_E04; SAD10319_P04_C10; and SAD10319_P04_H12.

[0213] In some embodiments, the disclosure provides an antibody comprising a CDRH2 binding domain comprising a consensus motif, the consensus motif comprising the sequence SINAGTGX₁TX₂YSQKFQG, wherein X₁ is F or N, and wherein X₂ is Y or D (SEQ ID NO: 18). In some embodiments, at least one of X₁ and X₂ is H. The following 3 clones include this consensus motif: SAD10319_P02_B05; SAD10319_P02_B06; and SAD10319_P05_D02.

[0214] In some embodiments, the disclosure provides an antibody comprising a CDRH2 binding domain comprising a consensus motif, the consensus motif comprising the sequence X₁IX₂X₃GTGX₄TDYSQKFQG, wherein X₁ is D or W, wherein X₂ is N or H, wherein X₃ is A or S, and wherein X₄ is A or N (SEQ ID NO: 19). In some embodiments, at least one of X₁, X₂, X₃, and X₄ is H. The following 3 clones include this consensus motif: SAD10319_P05_B03 SAD10319_P05_B04; and SAD10319_P05_D04.

[0215] In some embodiments, the disclosure provides an antibody comprising a CDRH2 binding domain comprising a consensus motif, the consensus motif comprising the sequence WIDPX₁TGATX₂YSQKFQG, wherein X₁ is N, H, or Y, and wherein X₂ is V or K (SEQ ID NO: 20). In some embodiments, at least one of X₁ and X₂ is H. The following 3 clones include this consensus motif: SAD10319_P01_C03; SAD10319_P03_G09; and SAD10319_P06_F10.

[0216] In some embodiments, the disclosure provides an antibody comprising a CDRH2 binding domain comprising a consensus motif, the consensus motif comprising the sequence WIX₁PX₂TGNTKYSQKFQG, wherein X₁ is D or N, and wherein X₂ is L, I, or V (SEQ ID NO: 21). In some embodiments, at least one of X₁ and X₂ is H. The following 3 clones include this consensus motif: SAD10319_P01_A02; SAD10319_P04_C12; and SAD10319_P05_G02.

[0217] In some embodiments, the disclosure provides an antibody comprising a CDRH2 binding domain comprising a consensus motif, the consensus motif comprising the sequence SINAGDANTKYSQKFQG (SEQ ID NO: 22). The following 2 clones include this consensus motif: SAD10319_P04_G11 and SAD10319_P06_H07.

[0218] In some embodiments, the disclosure provides an antibody comprising a CDRH2 binding domain comprising a consensus motif, the consensus motif comprising the sequence X₁IDPX₂TGATX₃YSQKFQG, wherein X₁ is D or W, wherein X₂ is D or V, and wherein X₃ is E or D (SEQ ID NO: 23). In some embodiments, at least one of X₁, X₂, and X₃ is H. The following 2 clones include this consensus motif: SAD10319_P05_G04 and SAD10319_P06_E08.

[0219] In some embodiments, the disclosure provides an antibody comprising a CDRH2 binding domain comprising a consensus motif, the consensus motif comprising the sequence WINAGDAATVYSQKFQG (SEQ ID NO: 24). The following 2 clones include this consensus motif: SAD10319_P06_G11 and SAD10319_P06_H11.

[0220] In some embodiments, the disclosure provides an antibody comprising a CDRH2 binding domain comprising a consensus motif, the consensus motif comprising the sequence X₁IX₂X₃X₄X₅X₆X₇TX₈YSQKFQG, wherein X₁ is W, S, Y, F, G, or D, wherein X₂ is N, T, D, V, or H, wherein X₃ is A, P, or S, wherein X₄ is G, A, S, N, D, L, V, H, Q, T, I, or Y, wherein X₅ is D or T, wherein X₆ is A or G, wherein X₇ is A, N, T, S, L, D, F, Y, or E, and wherein X₈ is V, K, T, D, Y, F, A, H, N, L, I, or E (SEQ ID NO: 59). In some embodiments, at least one of X₁, X₂, X₃, X₄, X₅, X₆, X₇, and X₈ is H. The following clones include this consensus motif: SAD10319_P01_E02; SAD10319_P01_H02; SAD10319_P01_B03; SAD10319_P02_A04 SAD10319_P02_B04; SAD10319_P02_C04; SAD10319_P02_F04; SAD10319_P02_H04; SAD10319_P02_A05; SAD10319_P02_C05; SAD10319_P02_C06; SAD10319_P02_E06; SAD10319_P02_F06; SAD10319_P02_G06; SAD10319_P03_D08; SAD10319_P03_F09; SAD10319_P04_G10; SAD10319_P04_C11; SAD10319_P05_A01; SAD10319_P05_A05; SAD10319_P05_G03; SAD10319_P06_A10; SAD10319_P06_C12; SAD10319_P06_E09; SAD10319_P01_E01; SAD10319_P01_G01; SAD10319_P01_D02; SAD10319_P01_D03; SAD10319_P02_E05; SAD10319_P02_A06; SAD10319_P03_C07; SAD10319_P03_G07; SAD10319_P03_B09; SAD10319_P03_E09; SAD10319_P04_A10; SAD10319_P04_B10; SAD10319_P04_B11; SAD10319_P04_E12; SAD10319_P05_A02; SAD10319_P05_C05; SAD10319_P05_D01; SAD10319_P05_H06; SAD10319_P06_A07; SAD10319_P06_B11; SAD10319_P06_F07; SAD10319_P06_G09; SAD10319_P06_H08; SAD10319_P01_C01; SAD10319_P01_D01; SAD10319_P01_H01; SAD10319_P01_F02; SAD10319_P02_D04; SAD10319_P02_D05; SAD10319_P02_F05; SAD10319_P02_H06; SAD10319_P03 G08; SAD10319_P04_D11; SAD10319_P05_A03; SAD10319_P05_B05; SAD10319_P05_C01; SAD10319_P05_D03; SAD10319_P05_F01; SAD10319_P05_G01; SAD10319_P06_H10; SAD10319_P02_G05; SAD10319_P05_B02; SAD10319_P05_C03; SAD10319_P05_D05; SAD10319_P06_B10; SAD10319_P06_C10; SAD10319_P06_D12; SAD10319_P01_A01; SAD10319_P01_F01; SAD10319_P01_C02; SAD10319_P04_F12; SAD10319_P05_E04; SAD10319_P06_A11; SAD10319_P01_F03; SAD10319_P02_H05; SAD10319_P02_D06; SAD10319_P03_E08; SAD10319_P03_H08; SAD10319_P03_H07; SAD10319_P04_E11; SAD10319_P04_F11; SAD10319_P04_B12; SAD10319_P04_D12; SAD10319_P02_E04; SAD10319_P04_C10; SAD10319_P04_H12; SAD10319_P02_B05; SAD10319_P02_B06; SAD10319_P05_D02; SAD10319_P05_B03; SAD10319_P05_B04; SAD10319_P05_D04; SAD10319_P01_C03; SAD10319_P03_G09; SAD10319_P06_F10; SAD10319_P01_A02; SAD10319_P04_C12; SAD10319_P05_G02; SAD10319_P04_G11; SAD10319_P06_H07; SAD10319_P05_G04; SAD10319_P06_E08; SAD10319_P06_G1; and SAD10319_P06_H11.

[0221] In some embodiments, the disclosure provides an antibody comprising a CDRH2 binding domain comprising a consensus motif, the consensus motif comprising the sequence WIDAGTGX₁TX₂YSQKFQG, wherein X₁ is L, F, N, or A and wherein X₂ is T or K (SEQ ID NO: 595). At least the following 4 clones include this consensus motif and are designated as Group 2 binders: ADI-48636, ADI-48638, ADI-48624, and ADI-48635.

[0222] In some embodiments, the disclosure provides an antibody comprising a CDRH1 binding domain comprising a consensus motif, the consensus motif comprising the sequence X₁NIKDYX₂MH, wherein X₁ is F or S, and wherein X₂ is Y or H (SEQ ID NO: 44). In some embodiments, at least one of X₁ and X₂ is H. In some embodiments, the sequence is FNIKDYHMH (SEQ ID NO: 25), SNIKDYYMH (SEQ ID NO: 26), or SNIKDYHMH (SEQ ID NO: 27). The following 148 clones include this consensus motif: LAD5224_P03_A01; SAD10318_P01_B01; SAD10318_P01_C01; SAD10318_P01_D01; SAD10318_P01_E01; SAD10318_P01_F01; SAD10318_P01_G01; SAD10318_P01_H01; SAD10318_P01_A02; SAD10318_P01_B02; SAD10318_P01_D02; SAD10318_P01_F02; SAD10318_P01_G02; SAD10318_P01_A03; SAD10318_P01_C03; SAD10318_P01_D03; SAD10318_P01_E03; SAD10318_P01_F03; SAD10318_P01_G03; SAD10318_P01_H03; SAD10318_P02_B04; SAD10318_P02_C04; SAD10318_P02_D04; SAD10318_P02_E04; SAD10318_P02_G04; SAD10318_P02_H04; SAD10318_P02_A05; SAD10318_P02_B05; SAD10318_P02_C05; SAD10318_P02_D05; SAD10318_P02_F05; SAD10318_P02_G05; SAD10318_P02_H05; SAD10318_P02_B06; SAD10318_P02_D06; SAD10318_P02_E06; SAD10318_P02 G06; SAD10318_P03_B07; SAD10318_P03_E07; SAD10318_P03_F07; SAD10318_P03_G07; SAD10318_P03_A08; SAD10318_P03_B08; SAD10318_P03_C08; SAD10318_P03_D08; SAD10318_P03_E08; SAD10318_P03_F08; SAD10318_P03_G08; SAD10318_P03_H08; SAD10318_P03_A09; SAD10318_P03_C09; SAD10318_P03_D09; SAD10318_P03_E09; SAD10318_P03_F09; SAD10318_P03_G09; SAD10318_P04_C10; SAD10318_P04_D10; SAD10318_P04_E10; SAD10318_P04_F10; SAD10318_P04_H10; SAD10318_P04_A11; SAD10318_P04_B11 SAD10318_P04_C11; SAD10318_P04_D11; SAD10318_P04_E11; SAD10318_P04_F11; SAD10318_P04_G11; SAD10318_P04_H11; SAD10318_P04_A12; SAD10318_P04_F12; SAD10318_P04_G12; SAD10318_P04_H12; SAD10320_P01_B01; SAD10320_P01_D01; SAD10320_P01_E01; SAD10320_P01_F01; SAD10320_P01_01; SAD10320_P01_H01; SAD10320_P01_A02; SAD10320_P01_C02; SAD10320_P01_E02; SAD10320_P01_F02; SAD10320_P01_G02; SAD10320_P01_H02; SAD10320_P01_A03; SAD10320_P01_B03; SAD10320_P01_C03; SAD10320_P01_D03; SAD10320_P01_E03; SAD10320_P01_F03; SAD10320_P01_G03; SAD10320_P01_H03; SAD10320_P02_A04; SAD10320_P02_B04; SAD10320_P02_C04; SAD10320_P02_E04; SAD10320_P02_H04; SAD10320_P02_A05; SAD10320_P02_B05; SAD10320_P02_C05; SAD10320_P02_D05; SAD10320_P02_E05; SAD10320_P02_F05; SAD10320_P02_H05; SAD10320_P02_A06; SAD10320_P02_B06; SAD10320_P02_C06; SAD10320_P02_D06; SAD10320_P02_E06; SAD10320_P02_F06; SAD10320_P02_G06; SAD10320_P02_H06; SAD10320_P03_B07; SAD10320_P03_E07; SAD10320_P03_H07; SAD10320_P03_C08; SAD10320_P03_D08; SAD10320_P03_F08; SAD10320_P03_H08; SAD10320_P03_A09; SAD10320_P03_C09; SAD10320_P03_D09; SAD10320_P03_F09; SAD10320_P04_A10; SAD10320_P04_C10; SAD10320_P04_D10; SAD10320_P04_E10; SAD10320_P04_F10; SAD10320_P04_G10; SAD10320_P04_A11; SAD10320_P04_D11; SAD10320_P04_E11; SAD10320_P04_F11; SAD10320_P04_G11; SAD10320_P04_H11; SAD10320_P04_A12; SAD10320_P04_D12; SAD10320_P04_E12; SAD10320_P04_F12; LAD9953_P01_H01; LAD9954_P01_B02; LAD9955_P01_G02; LAD9956_P01_C03; LAD9959_P01_E04; LAD9960_P01_D05; LAD9963_P01_E06; LAD9964_P01_C07; and LAD9966_P01_A08.

[0223] In some embodiments, the disclosure provides an antibody comprising a CDRH1 binding domain comprising a consensus motif, the consensus motif comprising the sequence YTFX₁X₂X₃X₄MH, wherein X₁ is A, K, D, Q, E, N, T, L, Y, S, P, G, H or V, wherein X₂ is T, S, or A, wherein X₃ is Y or I, and wherein X₄ is A, D, N, S, Y, T, I, V, L, E, P, R, or G (SEQ ID NO: 28). In some embodiments, at least one of X₁, X₂, X₃, and X₄ is H. The following 61 clones include this consensus motif: SAD10319_P01_A0; SAD10319_P01_D01 SAD10319_P01_E01; SAD10319_P01_F01; SAD10319_P01_F02; SAD10319_P01_B03; SAD10319_P01_D03; SAD10319_P01_F03; SAD10319_P02_A04; SAD10319_P02_C04; SAD10319_P02_D04; SAD10319_P02_E04; SAD10319_P02_F04; SAD10319_P02_H04; SAD10319_P02_A05; SAD10319_P02_E05; SAD10319_P02_A06; SAD10319_P02_B06; SAD10319_P02_C06; SAD10319_P02_F06; SAD10319_P02_G06; SAD10319_P02_H06; SAD10319_P03_C07; SAD10319_P03_G07; SAD10319_P03_H07; SAD10319_P03_D08; SAD10319_P03_G08; SAD10319_P03_H08; SAD10319_P03_E09; SAD10319_P03_F09; SAD10319_P03_G09; SAD10319_P04_B11; SAD10319_P04_C11; SAD10319_P04_D11; SAD10319_P04_G11; SAD10319_P04_B12; SAD10319_P04_C12; SAD10319_P04_D12; SAD10319_P04_E12; SAD10319_P05_A01; SAD10319_P05_A02; SAD10319_P05_A05; SAD10319_P05_B02; SAD10319_P05_B03; SAD10319_P05_C03; SAD10319_P05_C05; SAD10319_P05_D02; SAD10319_P05_G02; SAD10319_P05_G03; SAD10319_P05_G04; SAD10319_P06_A07; SAD10319_P06_A11; SAD10319_P06_B11; SAD10319_P06_C12; SAD10319_P06_E09; SAD10319_P06_F07; SAD10319_P06_F10; SAD10319_P06_G09; SAD10319_P06_H07; SAD10319_P06_H08; and SAD10319_P06_H10.

[0224] In some embodiments, the disclosure provides an antibody comprising a CDRH1 binding domain comprising a consensus motif, the consensus motif comprising the sequence YTFX₁X₂X₃X₄MH, wherein X₁ is T, D, A, N, or V, wherein X₂ is D, E, G, or Q, wherein X₃ is Y or D, and wherein X₄ is D, A, E, N, S, Y, or V (SEQ ID NO: 29). In some embodiments, at least one of X₁, X₂, X₃, and X₄ is H. The following 35 clones include this consensus motif: SAD10319_P01_C01; SAD10319_P01_H01; SAD10319_P01_A02; SAD10319_P01_C02; SAD10319_P01_D02; SAD10319_P01_H02; SAD10319_P01_C03; SAD10319_P02_B04; SAD10319_P02_B05; SAD10319_P02_C05; SAD10319_P02_D05; SAD10319_P02_D06; SAD10319_P02_E06; SAD10319_P03_E08; SAD10319_P03_B09; SAD10319_P04_C10; SAD10319_P04_G10; SAD10319_P04_E11; SAD10319_P04_F11; SAD10319_P04_F12; SAD10319_P05_A03; SAD10319_P05_B05; SAD10319_P05_C01; SAD10319_P05_D01; SAD10319_P05_D03; SAD10319_P05_D05; SAD10319_P05_E04; SAD10319_P05_F01; SAD10319_P05_H06; SAD10319_P06_A10; SAD10319_P06_B10; SAD10319_P06_C10; SAD10319_P06_E10; SAD10319_P06_G11; and SAD10319_P06_H11.

[0225] In some embodiments, the disclosure provides an antibody comprising a CDRH1 binding domain comprising a consensus motif, the consensus motif comprising the sequence YTFTSX₁X₂MH, wherein X₁ is A, D, or T, and wherein X₂ is D, F, A, M, V, or Y (SEQ ID NO: 30). In some embodiments, at least one of X₁ and X₂ is H. The following 7 clones include this consensus motif: SAD10319_P01_G01; SAD10319_P01_E02; SAD10319_P04_A10; SAD10319_P04_B10; SAD10319_P04_H12; SAD10319_P05_B04; and SAD10319_P05_D04.

[0226] In some embodiments, the disclosure provides an antibody comprising a CDRH1 binding domain comprising a consensus motif, the consensus motif comprising the sequence YTFX₁X₂YX₃MH, wherein X₁ is N or T, X₂ is Q or N, and X₃ is S, T, or A (SEQ ID NO: 31). In some embodiments, at least one of X₁, X₂, and X₃ is H. The following 4 clones include this consensus motif: SAD10319_P02_F05; SAD10319_P02_G05; SAD10319_P02_H05; and SAD10319_P05_G01.

[0227] In some embodiments, the disclosure provides an antibody comprising a CDRH1 binding domain comprising a consensus motif, the consensus motif comprising the sequence YTFX₁X₂YVMH, wherein X₁ is I or N, and wherein X₂ is K or R (SEQ ID NO: 32). In some embodiments, at least one of X₁ and X₂ is H. The following 2 clones include this consensus motif: SAD10319_P06_D12 and SAD10319_P06_E08.

[0228] In some embodiments, the disclosure provides an antibody comprising a CDRH1 binding domain comprising a consensus motif, the consensus motif comprising the sequence FNIKDYYMH (SEQ ID NO: 47). At least the following 6 clones include this consensus motif and are designated as Group 1 binders: ADI-48592, ADI-48595, ADI-48650, ADI-48652, ADI-48662, and ADI-48666. Additionally, at least the following 16 clones include this consensus motif and are designated as Group 2 binders: ADI-48575, ADI-48576, ADI-48577, ADI-48581, ADI-48586, ADI-48587, ADI-48588, ADI-48590, ADI-48591, ADI-48593, ADI-48601, ADI-48646, ADI-48647, ADI-48597, ADI-48643, and ADI-48645.

[0229] In some embodiments, the disclosure provides an antibody comprising a CDRH1 binding domain comprising a consensus motif, the consensus motif comprising the sequence YTFX₁X₂YX₃MH, wherein X₁ is E, S, or T, wherein X₂ is S or D, and wherein X₃ is A or D (SEQ ID NO: 31). At least the following 5 clones include this consensus motif and are designated as Group 2 binders: ADI-48636, ADI-48638, ADI-48624, ADI-48632, and ADI-48635.

[0230] In some embodiments, the disclosure provides an antibody comprising a CDRL3 binding domain comprising a consensus motif, the consensus motif comprising the sequence X₁X₂SX₃X₄X₅RX₆, wherein X₁ is H, K, or G, wherein X₂ is Q or H, wherein X₃ is Y or H, wherein X₄ is S, H, D, T, V, M, or L, wherein X₅ is R or H, and wherein X₆ is T or H (SEQ ID NO: 33). In some embodiments, at least one of X₁, X₂, X₃, X₄, and X₅ is H. The following 156 clones include this consensus motif: LAD5224_P03_A01; SAD10318_P01_B01; SAD10318_P01_C01; SAD10318_P01_D01; SAD10318_P01_E01; SAD10318_P01_G01; SAD10318_P01_B02; SAD10318_P01_D02; SAD10318_P01_F02; SAD10318_P01_G02; SAD10318_P01_A03; SAD10318_P01_C03; SAD10318_P01_D03; SAD10318_P01_E03; SAD10318_P01_F03; SAD10318_P02_B04; SAD10318_P02_C04; SAD10318_P02_D04; SAD10318_P02_E04; SAD10318_P02_H04; SAD10318_P02_A05; SAD10318_P02_B05; SAD10318_P02_C05; SAD10318_P02_F05; SAD10318_P02_G05; SAD10318_P02_H05; SAD10318_P02_D06; SAD10318_P02_E06; SAD10318_P02_G06; SAD10318_P03_E07; SAD10318_P03_F07; SAD10318_P03_A08; SAD10318_P03_B08; SAD10318_P03_C08; SAD10318_P03_D08; SAD10318_P03_E08; SAD10318_P03_F08; SAD10318_P03_G08; SAD10318_P03_H08; SAD10318_P03_D09; SAD10318_P03_G09; SAD10318_P04_D10; SAD10318_P04_F10; SAD10318_P04_H10; SAD10318_P04_B11; SAD10318_P04_C11; SAD10318_P04_D11; SAD10318_P04_E11; SAD10318_P04_F11; SAD10318_P04_G11; SAD10318_P04_H11; SAD10318_P04_F12; SAD10318_P04_G12; SAD10318_P04_H12; SAD10319_P01_A01; SAD10319_P01_C01; SAD10319_P01_D01; SAD10319_P01_E01; SAD10319_P01_F01; SAD10319_P01_G01; SAD10319_P01_H01; SAD10319_P01_A02; SAD10319_P01_C02; SAD10319_P01_D02; SAD10319_P01_E02; SAD10319_P01_F02; SAD10319_P01_H02; SAD10319_P01_B03; SAD10319_P01_C03; SAD10319_P01_D03; SAD10319_P01_F03; SAD10319_P02_A04; SAD10319_P02_B04; SAD10319_P02_C04; SAD10319_P02_D04; SAD10319_P02_E04; SAD10319_P02_F04; SAD10319_P02_H04; SAD10319_P02_A05; SAD10319_P02_B05 SAD10319_P02_C05; SAD10319_P02_D05; SAD10319_P02_E05; SAD10319_P02_F05; SAD10319_P02_G05; SAD10319_P02_H05; SAD10319_P02_A06; SAD10319_P02_B06; SAD10319_P02_C06; SAD10319_P02_D06; SAD10319_P02_E06; SAD10319_P02_F06; SAD10319_P02_G06; SAD10319_P02_H06; SAD10319_P03_C07; SAD10319_P03_G07; SAD10319_P03_H07; SAD10319_P03_D08; SAD10319_P03_E08; SAD10319_P03_G08; SAD10319_P03_H08; SAD10319_P03_B09; SAD10319_P03_E09; SAD10319_P03_F09; SAD10319_P03_G09; SAD10319_P04_A10; SAD10319_P04_B10; SAD10319_P04_C10; SAD10319_P04_G10; SAD10319_P04_B11; SAD10319_P04_C11; SAD10319_P04_D11; SAD10319_P04_E11; SAD10319_P04_F11; SAD10319_P04_G11; SAD10319_P04_B12; SAD10319_P04_C12; SAD10319_P04_D12; SAD10319_P04_E12; SAD10319_P04_F12; SAD10319_P04_H12; SAD10320_P01_D01; SAD10320_P01_F01; SAD10320_P01_C02; SAD10320_P01_E02; SAD10320_P01_B03; SAD1032_P01_H03; SAD10320_P02_C04; SAD10320_P02_E04; SAD10320_P02_H04; SAD10320_P02_B05; SAD10320_P02_D05; SAD10320_P02_H05; SAD10320_P02_A06; SAD10320_P02_E06; SAD10320_P02_F06; SAD10320_P02_G06; SAD10320_P03_B07; SAD10320_P03_H07; SAD10320_P03_F08; SAD10320_P04_A10; SAD10320_P04_E10; SAD10320_P04_G10; SAD10320_P04_A11; SAD10320_P04_F11; SAD10320_P04_D12; SAD10320_P04_F12; LAD9953_P01_H01; LAD9954_P01_B02; LAD9955_P01_G02; LAD9956_P01_C03; LAD9959_P01_E04; LAD9960_P01_D05; LAD9963_P01_E06; LAD9964_P01_C07; and LAD9966_P01_A08.

[0231] In some embodiments, the disclosure provides an antibody comprising a CDRL3 binding domain comprising a consensus motif, the consensus motif comprising the sequence KQSYX₁X₂RT, wherein X₁ is H, V, K, W, R, L, G, Y, or Q, and wherein X₂ is H, L, E, W, G, M, P, T, Q, or V (SEQ ID NO: 34). In some embodiments, at least one of X₁ and X₂ is H. The following 45 clones include this consensus motif: SAD10318_P01_F01; SAD10318_P01_H01; SAD10318_P01_A02; SAD10318_P01_G03; SAD10318_P01_H03; SAD10318_P02_G04; SAD10318_P02_D05; SAD10318_P02_B06; SAD10318_P03_G07; SAD10318_P03_A09; SAD10318_P03_C09; SAD10318_P03_E09; SAD10318_P04_A12; SAD10320_P01_B01; SAD10320_P01_E01; SAD10320_P01_G01; SAD10320_P01_A02; SAD10320_P01_F02; SAD10320_P01_G02; SAD10320_P01_C03; SAD10320_P01_D03; SAD10320_P01_E03; SAD10320_P01_F03; SAD10320_P01_G03; SAD10320_P02_B04; SAD10320_P02_A05; SAD10320_P02_C05; SAD10320_P02_F05; SAD10320_P02_B06; SAD10320_P02_D06; SAD10320_P02_H06; SAD10320_P03_E07; SAD10320_P03_C08; SAD10320_P03_D08; SAD10320_P03_H08; SAD10320_P03_C09; SAD10320_P04_C10; SAD10320_P04_D10; SAD10320_P04_F10; SAD10320_P04_D11; SAD10320_P04_E11; SAD10320_P04_G11; SAD10320_P04_H11; SAD10320_P04_A12; and SAD10320_P04_E12.

[0232] In some embodiments, the disclosure provides an antibody comprising a CDRL3 binding domain comprising a consensus motif, the consensus motif comprising the sequence X₁QSX₂HX₃RT, wherein X₁ is K or H, wherein X₂ is H, Y, M, S, L, E, G, or W, and wherein X₃ is R or K (SEQ ID NO: 35). In some embodiments, at least one of X₁, X₂, and X₃ is H. The following 14 clones include this consensus motif: SAD10318_P03_B07; SAD10318_P03_F09; SAD10318_P04_C10; SAD10318_P04_E10; SAD10318_P04_A11; SAD10320_P01_H01; SAD10320_P01_H02; SAD10320_P01_A03; SAD10320_P02_A04; SAD10320_P02_E05, SAD10320_P02_C06; SAD10320_P03_A09; SAD10320_P03_D09; and SAD10320_P03_F09.

[0233] In some embodiments, the disclosure provides an antibody comprising a CDRL3 binding domain comprising a consensus motif, the consensus motif comprising the sequence KQSX₁X₂X₃RT, wherein X₁ is Y or H, X₂ is T, S, V, or K, and X₃ is R or H (SEQ ID NO: 36). In some embodiments, at least one of X₁, X₂, and X₃ is H. The following 11 clones include this consensus motif: ADI-48576; ADI-48577; ADI-48587; ADI-48592, ADI-48595, ADI-48635, ADI-48650; ADI-48652; ADI-48666; ADI-48645; and ADI-48643.

[0234] In some embodiments, the disclosure provides an antibody comprising a CDRL3 binding domain comprising a consensus motif, the consensus motif comprising the sequence KQSX₁X₂X₃RT, wherein X₁ is H or Y, wherein X₂ is T, S, or Q, and wherein X₃ is R or H (SEQ ID NO: 36). In some embodiments, at least one of X₁ and X₃ is H. At least the following 6 clones include this consensus motif and are designated as Group 1 binders: ADI-48592, ADI-48595, ADI-48650, ADI-48652, ADI-48662, and ADI-48666.

[0235] In some embodiments, the disclosure provides an antibody comprising a CDRL3 binding domain comprising a consensus motif, the consensus motif comprising the sequence X₁QSX₂X₃X₄RT, wherein X₁ is K or H, wherein X₂ is Y or H, wherein X₃ is S, H, L, V, or K, and wherein X₄ is H, R, or E (SEQ ID NO: 598). In some embodiments, at least one of X₁, X₂, X₃, and X₄ is H. At least the following 21 clones include this consensus motif and are designated as Group 2 binders: ADI-48588, ADI-48587, ADI-48577, ADI-48590, ADI-48581, ADI-48575, ADI-48593, ADI-48591, ADI-48647, ADI-48636, ADI-48586, ADI-48646, ADI-48638, ADI-48597, ADI-48601, ADI-48576, ADI-48643, ADI-48624, ADI-48632, ADI-48635, and ADI-48645.

[0236] In some embodiments, the disclosure provides an antibody comprising a CDRL2 binding domain comprising a consensus motif, the consensus motif comprising the sequence WASTRES (SEQ ID NO: 37). The following 215 clones include this consensus motif: LAD5224_P03_A01; SAD10318_P01_B01; SAD10318_P01_C01; SAD10318_P01_D01; SAD10318_P01_E01; SAD10318_P01_F01; SAD10318_P01_G01; SAD10318_P01_H01; SAD10318_P01_A02; SAD10318_P01_B02; SAD10318_P01_D02; SAD10318_P01_F02; SAD10318_P01_G02; SAD10318_P01_A03; SAD10318_P01_C03; SAD10318_P01_D03; SAD10318_P01_E03; SAD10318_P01_F03; SAD10318_P01_G03; SAD10318_P01_H03; SAD10318_P02_B04; SAD10318_P02_C04; SAD10318_P02_D04; SAD10318_P02_E04; SAD10318_P02_G04; SAD10318_P02_H04; SAD10318_P02_A05; SAD10318_P02_B05; SAD10318_P02_C05; SAD10318_P02_D05; SAD10318_P02_F05; SAD10318_P02_G05; SAD10318_P02_H05; SAD10318_P02_B06; SAD10318_P02_D06; SAD10318_P02_E06; SAD10318_P02_G06; SAD10318_P03_B07; SAD10318_P03_E07; SAD10318_P03_F07; SAD10318_P03_G07; SAD10318_P03_A08; SAD10318_P03_B08; SAD10318_P03_C08; SAD10318_P03_D08; SAD10318_P03_E08; SAD10318_P03_F08; SAD10318_P03_G08; SAD10318_P03_H08; SAD10318_P03_A09; SAD10318_P03_C09; SAD10318_P03_D09; SAD10318_P03_E09; SAD10318_P03_F09; SAD10318_P03_G09; SAD10318_P04_C10; SAD10318_P04_D10; SAD10318_P04_E10; SAD10318_P04_F10; SAD10318_P04_H10; SAD10318_P04_A11; SAD10318_P04_111; SAD10318_P04_C11; SAD10318_P04_D11; SAD10318_P04_E11; SAD10318_P04_F11; SAD10318_P04_G11; SAD10318_P04_H11; SAD10318_P04_A12; SAD10318_P04_F12; SAD10318_P04_G12; SAD10318_P04_H12; SAD10319_P01_A01; SAD10319_P01_C01; SAD10319_P01_D01; SAD10319_P01_E01; SAD10319_P01_F01; SAD10319_P01_G01; SAD10319_P01_H01; SAD10319_P01_A02; SAD10319_P01_C02; SAD10319_P01_D02; SAD10319_P01_E02; SAD10319_P01_F02; SAD10319_P01_H02; SAD10319_P01_B03; SAD10319_P01_C03; SAD10319_P01_D03; SAD10319_P01_F03; SAD10319_P02_A04; SAD10319_P02_B04; SAD10319_P02_C04; SAD10319_P02_D04; SAD10319_P02_E04; SAD10319_P02_F04; SAD10319_P02_H04; SAD10319_P02_A05; SAD10319_P02_B05; SAD10319_P02_C05; SAD10319_P02_D05; SAD10319_P02_E05; SAD10319_P02_F05; SAD10319_P02_G05; SAD10319_P02_H05; SAD10319_P02_A06; SAD10319_P02_B06; SAD10319_P02_C06; SAD10319_P02_D06; SAD10319_P02_E06; SAD10319_P02_F06; SAD10319_P02_G06; SAD10319_P02_H06; SAD10319_P03_C07; SAD10319_P03_G07; SAD10319_P03_H07; SAD10319_P03_D08; SAD10319_P03_E08; SAD10319_P03_G08; SAD10319_P03_H08; SAD10319_P03_B09; SAD10319_P03_E09; SAD10319_P03_F09; SAD10319_P03_G09; SAD10319_P04_A10; SAD10319_P04_B10; SAD10319_P04_C10; SAD10319_P04_G10; SAD10319_P04_B11; SAD10319_P04_C11; SAD10319_P04_D11; SAD10319_P04_E11; SAD10319_P04_F11; SAD10319_P04_G11; SAD10319_P04_B12; SAD10319_P04_C12; SAD10319_P04_D12; SAD10319_P04_E12; SAD10319_P04_F12; SAD10319_P04_H12; SAD10320_P01_B01; SAD10320_P01_D01; SAD1032_P01_E01; SAD10320_P01_F01; SAD10320_P01_G01; SAD10320_P01_H01; SAD10320_P01_A02; SAD10320_P01_C02; SAD10320_P01_E02; SAD10320_P01_F02; SAD10320_P01_G02; SAD10320_P01_H02; SAD10320_P01_A03; SAD10320_P01_B03; SAD10320_P01_C03; SAD10320_P01_D03; SAD10320_P01_E03; SAD10320_P01_F03; SAD10320_P01_G03; SAD10320_P01_H03; SAD10320_P02_A04; SAD10320_P02_B04; SAD10320_P02_C04; SAD10320_P02_E04; SAD10320_P02_H04; SAD10320_P02_A05; SAD10320_P02_B05; SAD10320_P02_C05; SAD10320_P02_D05; SAD10320_P02_E05; SAD10320_P02_F05; SAD10320_P02_H05; SAD10320_P02_A06; SAD10320_P02_B06; SAD10320_P02_C06; SAD10320_P02_D06; SAD10320_P02_E06; SAD10320_P02_F06; SAD10320_P02_G06; SAD10320_P02_H06; SAD10320_P03_B07; SAD10320_P03_E07; SAD10320_P03_H07; SAD10320_P03_C08; SAD10320_P03_D08; SAD10320_P03_F08; SAD10320_P03_H08; SAD10320_P03_A09; SAD10320_P03_C09; SAD10320_P03_D09; SAD10320_P03_F09; SAD10320_P04_A10; SAD10320_P04_C10; SAD10320_P04_D10; SAD10320_P04_E10; SAD10320_P04_F10; SAD10320_P04_G10; SAD10320_P04_A11; SAD10320_P04_D11; SAD10320_P04_E11; SAD10320_P04_F11; SAD10320_P04_G11; SAD10320_P04_H11; SAD10320_P04_A12; SAD10320_P04_D12; SAD10320_P04_E12; SAD10320_P04_F12; LAD9953_P01_H01; LAD9954_P01_B02; LAD9955_P01_G02; LAD9956_P01_C03; LAD9959_P01_E04; LAD9960_P01_D05; LAD9963_P01_E06; LAD9964_P01_C07; and LAD9966_P01_A08. Additionally, at least the following 6 clones include this consensus motif and are designated as Group 1 binders: ADI-48592, ADI-48595, ADI-48650, ADI-48652, ADI-48662, and ADI-48666; and at least the following 21 clones include this consensus motif and are designated as Group 2 binders: ADI-48588, ADI-48587, ADI-48577, ADI-48590, ADI-48581, ADI-48575, ADI-48593, ADI-48591, ADI-48647, ADI-48636, ADI-48586, ADI-48646, ADI-48638, ADI-48597, ADI-48601, ADI-48576, ADI-48643, ADI-48624, ADI-48632, ADI-48635, and ADI-48645.

[0237] In some embodiments, the disclosure provides an antibody comprising a CDRL1 binding domain comprising a consensus motif, the consensus motif comprising the sequence KSSQSLLX1X₂X₃X₄GX₅NX₆LA, wherein X₁ is N or H, wherein X₂ is A, R, or T, wherein X₃ is R or H, wherein X₄ is T, P, or E, wherein X₅ is H or K, and wherein X₆ is H or Y (SEQ ID NO: 38). In some embodiments, at least one of X₁, X₂, X₃, X₄, X₅, and X₆ is H. The following 203 clones include this consensus motif: LAD5224_P03_A01; SAD10318_P01_B01; SAD10318_P01_D01; SAD10318_P01_E01; SAD10318_P01_F01; SAD10318_P01_G01; SAD10318_P01_H01; SAD10318_P01_B02; SAD10318_P01_D02; SAD10318_P01_F02; SAD10318_P01_G02; SAD10318_P01_A03; SAD10318_P01_C03; SAD10318_P01_D03; SAD10318_P01_E03; SAD10318_P01_F03; SAD10318_P01_G03; SAD10318_P01_H03; SAD10318_P02_B04; SAD10318_P02_C04; SAD10318_P02_D04; SAD10318_P02_E04; SAD10318_P02_G04; SAD10318_P02_H04; SAD10318_P02_A05; SAD10318_P02_B05; SAD10318_P02_C05; SAD10318_P02_D05; SAD10318_P02_F05; SAD10318_P02_H05; SAD10318_P02_B06; SAD10318_P02_D06; SAD10318_P02_G06; SAD10318_P03_B07; SAD10318_P03_E07; SAD10318_P03_F07; SAD10318_P03_G07; SAD10318_P03_A08; SAD10318_P03_B08; SAD10318_P03_C08; SAD10318_P03_D08; SAD10318_P03_E08; SAD10318_P03_F08; SAD10318_P03_G08; SAD10318_P03_H08; SAD10318_P03_A09; SAD10318_P03_C09; SAD10318_P03_D09; SAD10318_P03_E09; SAD10318_P03_F09; SAD10318_P03_G09; SAD10318_P04_C10; SAD10318_P04_D10; SAD10318_P04_E10; SAD10318_P04_H10; SAD10318_P04_A11; SAD10318_P04_B11; SAD10318_P04_C11; SAD10318_P04_D11; SAD10318_P04_E11; SAD10318_P04_F11; SAD10318_P04_G11; SAD10318_P04_H11; SAD10318_P04_A12; SAD10318_P04_F12; SAD10318_P04_G12; SAD10318_P04_H12; SAD10319_P01_A01; SAD10319_P01_C01; SAD10319_P01_D01; SAD10319_P01_E01; SAD10319_P01_F01; SAD10319_P01_G01; SAD10319_P01_H01; SAD10319_P01_A02; SAD10319_P01_C02; SAD10319_P01_D02; SAD10319_P01_E02; SAD10319_P01_F02; SAD10319_P01_H02; SAD10319_P01_B03; SAD10319_P01_C03; SAD10319_P01_D03; SAD10319_P01_F03; SAD10319_P02_A04; SAD10319_P02_B04; SAD10319_P02_C04; SAD10319_P02_D04; SAD10319_P02_E04; SAD10319_P02_F04; SAD10319_P02_H04; SAD10319_P02_A05; SAD10319_P02_B05; SAD10319_P02_C05; SAD10319_P02_D05; SAD10319_P02_E05; SAD10319_P02_F05; SAD10319_P02_G05; SAD10319_P02_H05; SAD10319_P02_A06; SAD10319_P02_B06; SAD10319_P02_C06; SAD10319_P02_D06; SAD10319_P02_E06; SAD10319_P02_F06; SAD10319_P02_G06; SAD10319_P02_H06; SAD10319_P03_C07; SAD10319_P03_G07; SAD10319_P03_H07; SAD10319_P03_D08; SAD10319_P03_E08; SAD10319_P03_G08; SAD10319_P03_H08; SAD10319_P03_B09; SAD10319_P03_E09; SAD10319_P03_F09; SAD10319_P03_G09; SAD10319_P04_A10; SAD10319_P04_B10; SAD10319_P04_C10; SAD10319_P04_G10; SAD10319_P04_111; SAD10319_P04_C11; SAD10319_P04_D11; SAD10319_P04_E11; SAD10319_P04_F11; SAD10319_P04_G11; SAD10319_P04_B12; SAD10319_P04_C12; SAD10319_P04_D12; SAD10319_P04_E12; SAD10319_P04_F12; SAD10319_P04_H12; SAD10320_P01_B01; SAD10320_P01_D01; SAD1032_P01_E01; SAD10320_P01_F01; SAD10320_P01_G01; SAD10320_P01_H01; SAD10320_P01_A02; SAD10320_P01_C02; SAD10320_P01_E02; SAD10320_P01_F02; SAD10320_P01_G02; SAD10320_P01_H02; SAD10320_P01_A03; SAD10320_P01_B03; SAD10320_P01_C03; SAD10320_P01_D03; SAD10320_P01_E03; SAD10320_P01_F03; SAD10320_P01_G03; SAD10320_P01_H03; SAD10320_P02_A04; SAD10320_P02_B04; SAD10320_P02_C04; SAD10320_P02_E04; SAD10320_P02_H04; SAD10320_P02_A05; SAD10320_P02_B05; SAD10320_P02_C05; SAD10320_P02_D05; SAD10320_P02_E05; SAD10320_P02_F05; SAD10320_P02_H05; SAD10320_P02_A06; SAD10320_P02_B06; SAD10320_P02_C06; SAD10320_P02_D06; SAD10320_P02_E06; SAD10320_P02_F06; SAD10320_P02_H06; SAD10320_P03_B07; SAD10320_P03_E07; SAD10320_P03_H07; SAD10320_P03_C08; SAD10320_P03_D08; SAD10320_P03_F08; SAD10320_P03_A09; SAD10320_P03_C09; SAD10320_P03_D09; SAD10320_P03_F09; SAD10320_P04_A10; SAD10320_P04_C10; SAD10320_P04_D10; SAD10320_P04_E10; SAD10320_P04_F10; SAD10320_P04_G10; SAD10320_P04_A11; SAD10320_P04_D11; SAD10320_P04_E11; SAD10320_P04_F11; SAD10320_P04_G1; SAD10320_P04_H11; SAD10320_P04_A12; SAD10320_P04_D12; SAD10320_P04_E12; SAD10320_P04_F12; LAD9954_P01_B02; LAD9955_P01 G02; LAD9963_P01_E06; and LAD9966_P01_A08.

[0238] In some embodiments, the disclosure provides an antibody comprising a CDRL1 binding domain comprising a consensus motif, the consensus motif comprising the sequence KSSQSLLX₁AX₂THX₃NX₄LA, wherein X₁ is N or H, wherein X₂ is R or H, wherein X₃ is K or H, and wherein X₄ is Y or H (SEQ ID NO: 39). In some embodiments, at least one of X₁, X₂, X₃, and X₄ is H. The following 10 clones include this consensus motif: SAD10318_P01_C01; SAD10318_P01_A02; SAD10318_P02_G05; SAD10318_P02_E06; SAD10318_P04_F10; LAD9953_P01_H01; LAD9956_P01_C03; LAD9959_P01_E04; LAD9960_P01_D05; and LAD9964_P01_C07.

[0239] In some embodiments, the disclosure provides an antibody comprising a CDRL1 binding domain comprising a consensus motif, the consensus motif comprising the sequence KSSQSLLNASTAKNYLA (SEQ ID NO: 40) or KSSQSLLNARTRTNYLA (SEQ ID NO: 41).

[0240] In some embodiments, the disclosure provides an antibody comprising a CDRL1 binding domain comprising a consensus motif, the consensus motif comprising the sequence KSSQSLLNX₁X₂X₃GX₄NX₅LA, wherein X₁ is S or A, X₂ is R or H, X₃ is E or T, X₄ is H or K, and X₅ is H or Y (SEQ ID NO: 42). In some embodiments, at least one of X₁, X₂, X₃, X₄, and X₅ is H. The following 11 clones include this consensus motif: ADI-48576; ADI-48577; ADI-48587; ADI-48592; ADI-48595; ADI-48635; ADI-48645; ADI-48650; ADI-48652; ADI-48643; and ADI-48666.

[0241] In some embodiments, the disclosure provides an antibody comprising a CDRL1 binding domain comprising a consensus motif, the consensus motif comprising the sequence KSSQSLLNX₁X₂TGX₃NYLA, wherein X₁ is A or S, wherein X₂ is R or H, and wherein X₃ is H or K (SEQ ID NO: 594). In some embodiments, at least one of X₂ and X₃ is H. At least the following 6 clones include this consensus motif and are designated as Group 1 binders: ADI-48592, ADI-48595, ADI-48650, ADI-48652, ADI-48662, and ADI-48666.

[0242] In some embodiments, the disclosure provides an antibody comprising a CDRL1 binding domain comprising a consensus motif, the consensus motif comprising the sequence KSSQSLLX₁AX₂X₃X₄X₅NX₆LA, wherein X₁ is N or H, wherein X₂ is R or H, wherein X₃ is T or E, wherein X₄ is G or H, wherein X₅ is H or K, and wherein X₆ is H or Y (SEQ ID NO: 597). In some embodiments, at least one of X₁, X₂, X₄, X₅, and X₆ is H. At least the following 21 clones include this consensus motif and are designated as Group 2 binders: ADI-48588, ADI-48587, ADI-48577, ADI-48590, ADI-48581, ADI-48575, ADI-48593, ADI-48591, ADI-48647, ADI-48636, ADI-48586, ADI-48646, ADI-48638, ADI-48597, ADI-48601, ADI-48576, ADI-48643, ADI-48624, ADI-48632, ADI-48635, and ADI-48645.

[0243] In some embodiments, the disclosure provides an antibody comprising a CDRH3 binding domain comprising a consensus motif, the consensus motif comprising the sequence AX₁DX₂YX₃HX₄FYDV, wherein X₁ is R or H, wherein X₂ is A or H, wherein X₃ is G, H, or P, and wherein X₄ is Y, H, D, V, E, S, N, L, M, I, G, A, Q, or T (SEQ ID NO: 1); a CDRH2 binding domain comprising a consensus motif, the consensus motif comprising the sequence WIDLENANTIYDAKFQG (SEQ ID NO: 9); WINPX₁TGATX₂YSQKFQG, wherein X₁ is S, D, A, N, L, or Q and wherein X₂ is V, T, D, Y, or K (SEQ ID NO: 45); or X₁IDAGTGATX₂YSQKFQG, wherein X₁ is W, S, or D and wherein X₂ is A, H, K, T, or D (SEQ ID NO: 46); a CDRH1 binding domain comprising a consensus motif, the consensus motif comprising the sequence FNIKDYYMH (SEQ ID NO: 47); a CDRL3 binding domain comprising a consensus motif, the consensus motif comprising the sequence KSQYX₁X₂RT, wherein X₁ is S, H, V, K, W, L, G, T, R, or Q and wherein X₂ is H, R, L, K, E, W, G, M, T, or V (SEQ ID NO: 48); a CDRL2 binding domain comprising a consensus motif, the consensus motif comprising the sequence WASTRES (SEQ ID NO: 37), and a CDRL1 binding domain comprising a consensus motif, the consensus motif comprising the sequence KSSQSLLNARTGKNYLA (SEQ ID NO: 49).

[0244] In some embodiments, the disclosure provides an antibody comprising a CDRH3 binding domain binding domain comprising a consensus motif, the consensus motif comprising the sequence ARDX₁YGX₂X₃X₄YDX₅ wherein X₁ is A or H, wherein X₂ is R or H, wherein X₃ is H or Y, wherein X₄ is F or H, and wherein X₅ is H or V (SEQ ID NO: 2); a CDRH2 binding domain comprising a consensus motif, the consensus motif comprising the sequence WIDLENANTIYDAKFQG (SEQ ID NO: 9) or WIX₁AGTGATX₂YSQKGQG, wherein X₁ is T, N, or D, and wherein X₂ is V or K (SEQ ID NO: 50); a CDRH1 binding domain comprising a consensus motif, the consensus motif comprising the sequence FNIKDYYMH (SEQ ID NO: 47) or YTFX₁X₂YX₃MH, wherein X₁ is T or A, X₂ is E, D, A, S, G or Q, and X₃ is D, A, V, or E (SEQ ID NO: 51); a CDRL3 binding domain comprising a consensus motif, the consensus motif comprising the sequence KQSX₁SRRT, wherein X₁ is H or Y (SEQ ID NO: 52); a CDRL2 binding domain comprising a consensus motif, the consensus motif comprising the sequence WASTRES (SEQ ID NO: 37); and a CDRL1 binding domain comprising a consensus motif, the consensus motif comprising the sequence KSSQSLLX₁AX₂TX₃X₄NX₅LA, wherein X₁ is N or H, X₂ is R or H, X₃ is G or H, X₄ is K or H, and X₅ is H or Y (SEQ ID NO: 53).

[0245] In some embodiments, the disclosure provides an antibody comprising a CDRH3 binding domain comprising a consensus motif, the consensus motif comprising the sequence ARDAHX₁X₂YX₃X₄DX₅, wherein X₁ is G, E, or R, wherein X₂ is R or H, wherein X₃ is F or H, wherein X₄ is Y or H, and wherein X₅ is V or H (SEQ ID NO: 3); a CDRH2 binding domain comprising a consensus motif, the consensus motif comprising the sequence WIDLENANTIYDAKFQG (SEQ ID NO: 9); a CDRH1 binding domain comprising a consensus motif, the consensus motif comprising the sequence FNIKDYYMH (SEQ ID NO: 47); a CDRL3 binding domain comprising a consensus motif, the consensus motif comprising the sequence KQSYSRRT (SEQ ID NO: 54); a CDRL2 binding domain comprising a consensus motif, the consensus motif comprising the sequence WASTRES (SEQ ID NO: 37); and a CDRL1 binding domain comprising a consensus motif, the consensus motif comprising the sequence KSSQSLLNAX₁TGX₂NX₃LA, wherein X₁ is H or R, wherein X₂ is H or K, and X₃ is H or Y (SEQ ID NO: 55).

[0246] In some embodiments, the disclosure provides an antibody or antigen-binding fragment comprising a CDRH3 binding domain comprising a consensus motif, the consensus motif comprising the sequence ARDAX₁X₂X₃X₄FYDX₅, wherein X₁ is T, H, or Y, wherein X₂ is G or H, wherein X₃ is H or R, wherein X₄ is V or Y, wherein X₅ is V or H, and wherein, optionally, at least one of X₁, X₂, X₃, and X₅ is H (SEQ ID NO: 593); a CDRH2 binding domain comprising a consensus motif, the consensus motif comprising the sequence WIDLENANTIYDAKFQG (SEQ ID NO: 9); a CDRH1 binding domain comprising a consensus motif, the consensus motif comprising the sequence FNIKDYYMH (SEQ ID NO: 47); a CDRL3 binding domain comprising a consensus motif, the consensus motif comprising the sequence KQSX₁X₂X₃RT, wherein X₁ is H or Y, wherein X₂ is T, S, or Q, wherein X₃ is R or H, and, optionally, wherein at least one of X₁ and X₃ is H (SEQ ID NO: 36); a CDRL2 binding domain comprising a consensus motif, the consensus motif comprising the sequence WASTRES (SEQ ID NO: 37); and/or a CDRL1 binding domain comprising a consensus motif, the consensus motif comprising the sequence KSSQSLLNX₁X₂TGX₃NYLA, wherein X₁ is A or S, wherein X₂ is R or H, wherein X₃ is H or K, and, optionally, wherein at least one of X₂ and X₃ is H (SEQ ID NO: 594). In some embodiments, said antibody or antigen-binding fragment is designated as a Group 1 binder comprising a CD3 binding domain selected from ADI-48592, ADI-48595, ADI-48650, ADI-48652, ADI-48662, and ADI-48666.

[0247] In some embodiments, the disclosure provides an antibody or antigen-binding fragment comprising a CDRH3 binding domain comprising a consensus motif, the consensus motif comprising the sequence AX₁DX₂X₃X₄X₅X₆X₇YDX₈, wherein X₁ is R or H, wherein X₂ is H or A, wherein X₃ is H or Y, wherein X₄ is H, G, or P, wherein X₅ is R or H, wherein X₆ is Y, I, or V, wherein X₇ is F or H, wherein X₈ is V or H, and, optionally, wherein at least one of X₁, X₂, X₃, X₄, X₅, X₇, and X₈ is H (SEQ ID NO: 596); a CDRH2 binding domain comprising a consensus motif, the consensus motif comprising the sequence WIDLENANTIYDAKFQG (SEQ ID NO: 9) or the sequence WIDAGTGX₁TX₂YSQKFQG, wherein X₁ is L, F, N, or A and wherein X₂ is T or K (SEQ ID NO: 595); a CDRH1 binding domain comprising a consensus motif, the consensus motif comprising the sequence FNIKDYYMH (SEQ ID NO: 47) or the sequence YTFX₁X₂YX₃MH, wherein X₁ is E, S, or T, wherein X₂ is S or D, and wherein X₃ is A or D (SEQ ID NO: 31); a CDRL3 binding domain comprising a consensus motif, the consensus motif comprising the sequence X₁QSX₂X₃X₄RT, wherein X₁ is K or H, wherein X₂ is Y or H, wherein X₃ is S, H, L, V, or K, wherein X₄ is H, R, or E, and, optionally, wherein at least one of X₁, X₂, X₃, and X₄ is H (SEQ ID NO: 598); a CDRL2 binding domain comprising a consensus motif, the consensus motif comprising the sequence WASTRES (SEQ ID NO: 37); and/or a CDRL1 binding domain comprising a consensus motif, the consensus motif comprising the sequence KSSQSLLX₁AX₂X₃X₄X₅NX₆LA, wherein X₁ is N or H, wherein X₂ is R or H, wherein X₃ is T or E, wherein X₄ is G or H, wherein X₅ is H or K, wherein X₆ is H or Y, and wherein, optionally, at least one of X₁, X₂, X₄, X₅, and X₆ is H (SEQ ID NO: 597). In some embodiments, said antibody or antigen-binding fragment is designated as a Group 2 binder comprising a CD3 binding domain selected from ADI-48588, ADI-48587, ADI-48577, ADI-48590, ADI-48581, ADI-48575, ADI-48593, ADI-48591, ADI-48647, ADI-48636, ADI-48586, ADI-48646, ADI-48638, ADI-48597, ADI-48601, ADI-48576, ADI-48643, ADI-48624, ADI-48632, ADI-48635, and ADI-48645.

### Materials and Methods

[0248] In addition to the description provided above, the following Materials and Methods were employed in the Examples.

[0249] Hu and Cy CD3εϵ Fc heterodimer antigen production. Recombinant heterodimeric CD3 Fc fusion antigens were produced in HEK 293 cells by co-transfection of plasmids encoding Hu CD3ε Fc (ectodomain, ECD, residues 22-126) and CD3δ Fc-HIS (ECD residues 22-100) or Cy CD3ε Fc (ECD residues 22-117) and CD3δ Fc-HIS (ECD residues 22-100) utilizing a heterologous signal peptide sequence. Chromatographic separations were performed on a computer controlled ÄKTA Avant 150 preparative chromatography system (GE Healthcare Life Sciences) equipped with an integrated conductivity sensor, enabling in-line salt concentration monitoring during the run. Clarified culture supernatants were purified by Ni Sepharose 6 Fast Flow (GE Healthcare Life Sciences), which removes the CD3εε Fc-HIS homodimer. CD3εδ Fc-HIS heterodimer was resolved from CD366 Fc-HIS homodimer by Mono Q 10/100 GL by a linear Tris-buffered KCl gradient at pH 8.5.

[0250] Peptides. C-terminally biotinylated CD3ε N-terminal peptides were obtained from New England Peptide. All peptides were delivered with a purity of ≥95%. Peptides were designed based on the primary sequence of Hu CD3ε and the crystal structure of Hu CD3εδ bound to OKT3 (Kjer-Nielsen L. et al. PNAS 2004). The CD3εN27 peptide has the sequence H2N-QDGNEEMGSITQTPYQVSISGTTVILT[K/SCBiot(dPEG4)]-amide (SEQ ID NO: 56) and the CD3εN13 peptide has the sequence H2N-QDGNEEMGGITQT[K/SCBiot(dPEG4)]-amide (SEQ ID NO: 57).

[0251] Antigen biotinylation. CD3 antigens were biotinylated using the EZ-Link Sulfo-NHS-Biotinylation Kit from Pierce. Goat anti-human F(ab′)2 kappa-FITC (LC-FITC), Extravidin-PE (EA-PE) and streptavidin-633 (SA-633) were obtained from Southern Biotech, Sigma and Molecular Probes, respectively. Streptavidin MicroBeads and MACS LC separation columns were purchased from Miltenyi Biotec.

[0252] Cell line propagation and cell labeling assays. Human Jurkat CD3+ cells (ATCC TIB-152) and Jurkat CD3− cells (ATCC TIB-153) were obtained from ATCC. Cyno HSC-F cells were obtained from the NIH Non-human Primate Reagent Resource. All cell lines were cultured in RPMI 1640 GlutaMax media supplemented with 10% fetal bovine serum (FBS).

[0253] Cell labeling was conducted by aliquoting 100,000-200,000 cells per well in a 96-well assay plate. Cells were centrifugated at 500×g for 5 min at 4° C., then resuspended in 100 μl of 100 nM IgG and incubated at room temperature for 20 min. Cells were then washed in buffer (phosphate-buffered saline (PBS)/0.1% bovine serum albumin (BSA) three times and resuspended in secondary reagent, typically goat anti-human R-PE (Southern Biotech). The plate was assayed on a FACSCanto (BD Biosciences) using an HTS sample injector. Flow cytometry data was analyzed for median fluorescence intensity in the R-PE channel.

[0254] FACS affinity pressured selection methods. Briefly, yeast cells (at least ˜2×10⁷ cells/labeling condition) were incubated with a volume of biotinylated antigen sufficient to represent a stoichiometric excess with respect to the average IgG presentation number. Antigen labeling conditions are 100 to 1 nM under equilibrium conditions, typically carried out for 20 min to several hours at room temperature in FACS wash buffer (phosphate-buffered saline (PBS)/0.1% bovine serum albumin (BSA)). After washing three times with wash buffer, yeast are then stained with secondary reagents anti-human light chain FITC conjugate (LC-FITC) diluted 1:100 and either streptavidin-633 (SA-633) diluted 1:500 or extravidin-phycoerythrin (EA-PE) diluted 1:50 for 15 min at 4° C. After washing twice with ice-cold wash buffer, the cell pellets are resuspended in wash buffer in a typical volume of at least 1 mL per 1×10⁷ yeast and transferred to strainer-capped sort tubes. Sorting is performed using a FACS ARIA sorter (BD Biosciences) and sort gates are determined to select for binders. After the final round of sorting, yeast were plated and individual colonies picked for characterization.

[0255] Antibody yeast production and purification. Yeast clones were grown to saturation and then induced for 48 h at 30° C. with shaking. After induction, yeast cells were pelleted and the supernatants were harvested for purification. IgGs were purified using a Protein A column and eluted with acetic acid, pH 2.0. Fab fragments were generated by papain digestion and purified over KappaSelect or CaptureSelect IgG-CH1 (GE Healthcare LifeSciences).

[0256] Antibody HEK production and purification. Mammalian expression of IgG was done by sub-cloning antibodies into a new expression vector followed by transient transfection and expression in HEK293ADI1, a monoclonal cell line derived from HEK293 (DSMZ) selected for clump-free growth, growth rate, and transfectability. Briefly, expression vectors containing the antibody of interest were transfected by complexing with a transfection reagent followed by exposure to HEK cells for one hour followed by dilution of culture media to a final density of 4 million cells per mL. The cells were then cultured for 7 days with fresh feed media every 48 hours. After 7 days, the supernatant was collected following centrifugation and purification was performed using protein A. If necessary, a CHT column purification was added to reach >95% monomer.

[0257] Cell binding assays. CD3+ human Jurkat cells (ATCC) and CHO-S cells (Invitrogen/ThermoFisher) were thawed and washed with cold PBSF buffer, pH 7.4 (PBS+0.1% BSA, pH 7.4). About 200,000 cells were aliquoted per well of a 96-well plate (FACS Assay Plate VWR BD 353263) and pelleted by centrifugation (5 minutes at 500×g). The cells were washed with either PBSF pH 7.4 or PBSF pH 6.0 (PBS+0.1% BSA, pH 6.0), and then resuspended in 100 ul in either PBSF pH 7.4 or PBSF pH 6.0 with IgG antibody (100 nM) produced in yeast as described above. The mixture (cells+antibody) was incubated for 20 minutes on ice, then washed twice with either PBSF pH 7.4 or PBSF pH 6.0. Cells were resuspended in 50 ul of propidium iodide (Roche; 1:500 dilution) and anti-human IgG-RPE (Southern Biotech; 1:100 dilution) prepared in either PBSF pH 7.4 or PBSF pH 6.0, then incubated for 20 minutes on ice in the dark before cells were washed twice with either PBSF pH 7.4 or PBSF pH 6.0. Binding was analyzed on FACS Canto II.

[0258] ForteBio K_{D} measurements (Biolayer interferometry; BLI). ForteBio affinity measurements were performed generally as previously described (Estep, P., et al., High throughput solution-based measurement of antibody-antigen affinity and epitope binning. MAbs, 2013. 5(2): p. 270-8.). Briefly, ForteBio affinity measurements were performed by loading IgGs online onto AHC sensors. Sensors were equilibrated off-line in assay buffer for 30 min and then monitored on-line for 60 seconds for baseline establishment. Sensors with loaded IgGs were exposed to 100 nM antigen (e.g., CD3) for 5 min, afterwards they were transferred to assay buffer for 5 min for off-rate measurement. Kinetics were analyzed using the 1:1 binding model.

[0259] PSR Preparation. Polyspecific reactivity reagent (PSR) was prepared as described in, e.g., WO 2014/179363 and Xu et. al., Protein Eng Des Sel, 26(10):663-670 (2013). In brief, 2.5 liters CHO-S cells were used as starting material. The cells were pelleted at 2,400×g for 5 min in 500 mL centrifuge bottles filled to 400 mL. Cell pellets were combined and then resuspended in 25 ml Buffer B and pelleted at 2,400×g for 3 min. The buffer was decanted and the wash repeated one time. Cell pellets were resuspended in 3× the pellet volume of Buffer B containing 1× protease inhibitors (Roche, Complete, EDTA-free) using a polytron homogenizer with the cells maintained on ice. The homogenate was then centrifuged at 2,400×g for 5 min and the supernatant retained and pelleted one additional time (2,400×g/5 min) to ensure the removal of unbroken cells, cell debris and nuclei; the resultant supernatant is the total protein preparation. The supernatant was then transferred into two Nalgene Oak Ridge 45 mL centrifuge tubes and pelleted at 40,000×g for 40 min at 4° C. The supernatants containing the Separated Cytosolic Proteins (SCPs) were then transferred into clean Oak Ridge tubes, and centrifuged at 40,000×g one more time. In parallel, the pellets containing the membrane fraction (EMF) were retained and centrifuged at 40,000 for 20 min to remove residual supernatant. The EMF pellets were then rinsed with Buffer B. 8 mL Buffer B was then added to the membrane pellets to dislodge the pellets and transfer into a Dounce Homogenizer. After the pellets were homogenized, they were transferred to a 50 mL conical tube and represented the final EMF preparation.

[0260] One billion mammalian cells (e.g. CHO, HEK293, Sf9) at ˜10⁶-10⁷ cells/mL were transferred from tissue culture environment into 4×250 mL conical tubes and pelleted at 550×g for 3 min. All subsequent steps were performed at 4° C. or on ice with ice-cold buffers. Cells were washed with 100 mL of PBSF (lx PBS+1 mg/mL BSA) and combined into one conical tube. After removing the supernatant, the cell pellet was then re-suspended in 30 mL Buffer B (50 mM HEPES, 0.15 M NaCl, 2 mM CaCl2, 5 mM KCl, 5 mM MgCl2, 10% Glycerol, pH 7.2) and pelleted at 550×g for 3 min. Buffer B supernatant was decanted and cells re-suspended in 3× pellet volume of Buffer B plus 2.5× protease inhibitor (Roche, cOmplete, EDTA-free). Protease inhibitors in Buffer B were included from here on forward. Cells were homogenized four times for 30 sec pulses (Polyton homogenizer, PT1200E) and the membrane fraction was pelleted at 40,000×g for 1 hour at 4° C. The pellet is rinsed with 1 mL Buffer B; the supernatant is retained and represents the s. The pellet is transferred into a Dounce homogenizer with 3 mL of Buffer B and re-suspended by moving the pestle slowly up and down for 30-35 strokes. The enriched membrane fraction (EMF) is moved into a new collection tube, rinsing the pestle to collect all potential protein. Determine the protein concentration of the purified EMF using the Dc-protein assay kit (BioRad). To solubilize the EMF, transfer into Solubilization Buffer (50 mM HEPES, 0.15 M NaCl, 2 mM CaCl2, 5 mM KCl, 5 mM MgCl2, 1% n-Dodecyl-b-D-Maltopyranoside (DDM), 1× protease inhibitor, pH 7.2) to a final concentration of 1 mg/mL. Rotate the mixture overnight at 4° C. rotating followed by centrifugation in a 50 mL Oak Ridge tube (Fisher Scientific, 050529-ID) at 40,000×g for 1 hour. Collect the supernatant which represents the soluble membrane proteins (SMPs) and quantify the protein yield as described above.

[0261] For biotinylation, prepare the NHS-LC-Biotin stock solution according to manufacturer's protocol (Pierce, Thermo Fisher). In brief, 20 ul of biotin reagent is added for every 1 mg of EMF sample and incubated at 4° C. for 3 hours with gentle agitation. Adjust the volume to 25 mL with Buffer B and transfer to an Oak Ridge centrifuge tube. Pellet the biotinylated EMF (b-EMF) at 40,000×g for 1 hour, and rinse two times with 3 mL of Buffer C (Buffer B minus the glycerol) without disturbing the pellet. Remove the residual solution. Re-suspended the pellet with a Dounce homogenizer in 3 mL of Buffer C as described previously. The re-suspended pellet now represents biotinylated EMF (b-EMF). Solubilized as described above to prepare b-SMPs.

[0262] PSR Binding Analyses. Assays were performed generally as described in, e.g., Xu et al. Protein Eng Des Sel, 26(10):663-670 (2013). To characterize the PSR profile of monoclonal antibodies presented on yeast, two million IgG-presenting yeast were transferrred into a 96-well assay plate and pellet at 3000×g for 3 min to remove supernatant. Re-suspend the pellet in 50 ul of freshly prepared 1:10 dilution of stock b-PSRs and incubate on ice for 20 minutes. Wash the cells twice with 200 ul of cold PBSF and pellet re-suspended in 50 ul of secondary labeling mix (Extravidin-R-PE, anti-human LC-FITC, and propidium iodide). Incubate the mix on ice for 20 minutes followed by two washes with 200 ul ice-cold PBSF. Re-suspend the cells in 100 ul of ice-cold PBSF and run the plate on a FACSCanto (BD Biosciences) using HTS sample injector. Flow cytometry data was analyzed for mean fluorescence intensity in the R-PE channel and normalized to proper controls in order to assess non-specific binding. Numerous methods for presentation or display of antibodies or antibody fragments on the surface of yeast have been described previously, all of which are consistent with this protocol (Blaise et al., Gene, 342(2):211-8 (2004), Boder and Wittrup, Nat Biotechnol., 15(6):553-7 (1997), Kuroda and Ueda, Biotechnol Lett., 33(1):1-9 (2011), Orcutt and Wittrup, Springer Protocols: Antibody Engineering, 1:207-233 (2010), Rakestraw et al., Protein Eng Des Sel., 24(6):525-30 (2011), Sazinsky et al., Proc Natl Acad Sci USA., 105(51):20167-72 (2008), Tasumi et al., Proc Natl Acad Sci USA., 106(31):12891-6 (2009)).

[0263] ForteBio Kinetics. FortBio Octet HTX instruments were used in 12 channel mode (8 sensors per channel, 96 sensors per experiment) with either AHC, SA, or AHQ sensors. Instrumentation was driven by manufacturer supplied software (versions 8.2 and 9.0). Sample names and concentrations were input into the plate data page, and sensor associated proteins were identified in the “information” column on the sensor data page. Kinetic experiments were collected with either a 90 or 180 s baseline, 180 s association phase, and 180 s dissociation phase. All files were saved into a shared network drive with a naming convention that identifies the format of the experiment.

[0264] HIC. IgG1 samples were buffer exchanged into 1 M ammonium sulfate and 0.1 M sodium phosphate at pH 6.5 using a Zeba 40 kDa 0.5 mL spin column (Thermo Pierce, cat #87766). A salt gradient was established on a Dionex ProPac HIC-10 column from 1.8 M ammonium sulfate, 0.1 M sodium phosphate at pH 6.5 to the same condition without ammonium sulfate. The gradient ran for 17 min at a flow rate of 0.75 ml/min. An acetonitrile wash step was added at the end of the run to remove any remaining protein and the column was re-equilibrated over 7 column volumes before the next injection cycle. Peak retention times were monitored at A280 absorbance and concentrations of ammonium sulfate at elution were calculated based on gradient and flow rate.

[0265] LCMS. mAb samples were reduced by DTT, followed by middle down LCMS analysis on a Bruker maXis4G mass spectrometer coupled with an Agilent 1100 HPLC (Agilent). A POROS R2 10 m (2.1×30 mm) reversed phase column was used to remove salt in the samples. A fast LC flow at 2 mL/min allows the separation between sample and salt and elution of samples and regeneration of column to finish within a 2.1 min cycle. A T-junction is used to deliver only 0.15 mL/min sample flow into the mass spectrometer for sample analysis. The Bruker maXis 4G mass spectrometer was run in positive ion mode with detection in the range of 750 to 2500 m/z. The remaining source parameters were set as follows; the capillary was set at 5500V, the Nebulizer at 4.0 Bar, dry gas at 4.0 l/min, and dry temp set at 200° C.

[0266] The MS spectra were analyzed using Bruker Data Analysis version 4.1 and the deconvolution was accomplished using maximum entropy deconvolution with a mass range of 20 to 30 kDa.

[0267] An informal sequence listing is provided in Table 1. The informal sequence listing provides the heavy chain variable region (“HC”) amino acid sequence, with each of the heavy chain variable region CDRs underlined, and the light chain variable region (“LC”), with each of the light chain variable region CDRs underlined.

TABLE 1
Informal Sequence Listing

| Antibody | SEQ ID | | | |
|---|---|---|---|---|
| No. | NO: | Sequence | Clone # (ADI) | Descriptors |
| Ab1 | 60 | QVQLVQSGAEVKKPGASVKVSCKASGFNIKDYYMH | LAD5224_P03_A01 | HC amino acid sequence |
| | | WVRQAPGQRLEWMGWIDLENANTIYDAKFQGRVTI | (ADI-26906) | |
| | | TRDTSASTAYMELSSLRSEDTAVYYCARDAYGRYFY | | |
| | | DVWGQGTLVTVSS | | |
| Ab1 | 61 | DIVMTQSPDSLAVSLGERATINCKSSQSLLNARTGKN | LAD5224_P03_A01 | LC amino acid sequence |
| | | YLAWYQQKPGQPPKLLIYWASTRESGVPDRFSGSGS | (ADI-26906) | |
| | | GTDFTLTISSLQAEDVAVYYCKQSYSRRTFGGGTKVE | | |
| | | IK | | |
| Ab2 | 62 | QVQLVQSGAEVKKPGASVKVSCKASGFNIKDYYMH | SAD10318_P01_B01 | HC amino acid sequence |
| | | WVRQAPGQRLEWMGWIDLENANTIYDAKFQGRVTI | (ADI-48574) | |
| | | TRDTSASTAYMELSSLRSEDTAVYYCARDAYGRYHY | | |
| | | DHWGQGTLVTVSS | | |
| Ab2 | 63 | DIVMTQSPDSLAVSLGERATINCKSSQSLLNAHTGHN | SAD10318_P01_B01 | LC amino acid sequence |
| | | YLAWYQQKPGQPPKLLIYWASTRESGVPDRFSGSGS | (ADI-48574) | |
| | | GTDFTLTISSLQAEDVAVYYCKQSYSRRTFGGGTKVE | | |
| | | IK | | |
| Ab3 | 64 | QVQLVQSGAEVKKPGASVKVSCKASGFNIKDYYMH | SAD10318_P01_D02 | HC amino acid sequence |
| | | WVRQAPGQRLEWMGWIDLENANTIYDAKFQGRVTI | (ADI-48584) | |
| | | TRDTSASTAYMELSSLRSEDTAVYYCARDAHHRYFY | | |
| | | DVWGQGTLVTVSS | | |
| Ab3 | 65 | DIVMTQSPDSLAVSLGERATINCKSSQSLLNARTGKN | SAD10318_P01_D02 | LC amino acid sequence |
| | | HLAWYQQKPGQPPKLLIYWASTRESGVPDRFSGSGS | (ADI-48584) | |
| | | GTDFTLTISSLQAEDVAVYYCKQSHSHRTFGGGTKVE | | |
| | | IK | | |
| Ab4 | 66 | QVQLVQSGAEVKKPGASVKVSCKASGYTFDSYIMH | SAD10319_P02_E05 | HC amino acid sequence |
| | | WVRQAPGQRLEWMGWIDAGTGATVYSQKFQGRVTI | (ADI-48630) | |
| | | TRDTSASTAYMELSSLRSEDTAVYYCARDAYGHYFY | | |
| | | DHWGQGTLVTVSS | | |
| Ab4 | 67 | DIVMTQSPDSLAVSLGERATINCKSSQSLLNARTGKN | SAD10319_P02_E05 | LC amino acid sequence |
| | | YLAWYQQKPGQPPKLLIYWASTRESGVPDRFSGSGS | (ADI-48630) | |
| | | GTDFTLTISSLQAEDVAVYYCKQSYSRRTFGGGTKVE | | |
| | | IK | | |
| Ab5 | 68 | QVQLVQSGAEVKKPGASVKVSCKASGYTFNNYAMH | SAD10319_P02_F05 | HC amino acid sequence |
| | | WVRQAPGQRLEWMGWIDAGTGNTDYSQKFQGRVTI | (ADI-57317) | |
| | | TRDTSASTAYMELSSLRSEDTAVYYCARDAHHRYFY | | |
| | | DVWGQGTLVTVSS | | |
| Ab5 | 69 | DIVMTQSPDSLAVSLGERATINCKSSQSLLNARTGKN | SAD10319_P02_F05 | LC amino acid sequence |
| | | YLAWYQQKPGQPPKLLIYWASTRESGVPDRFSGSGS | (ADI-57317) | |
| | | GTDFTLTISSLQAEDVAVYYCKQSYSRRTFGGGTKVE | | |
| | | IK | | |
| Ab6 | 70 | QVQLVQSGAEVKKPGASVKVSCKASGYTFTQYTMH | SAD10319_P02_G05 | HC amino acid sequence |
| | | WVRQAPGQRLEWMGSIDAGTGATKYSQKFQGRVTI | (ADI-57318) | |
| | | TRDTSASTAYMELSSLRSEDTAVYYCARDAYHHYFY | | |
| | | DVWGQGTLVTVSS | | |
| Ab6 | 71 | DIVMTQSPDSLAVSLGERATINCKSSQSLLNARTGKN | SAD10319_P02_G05 | LC amino acid sequence |
| | | YLAWYQQKPGQPPKLLIYWASTRESGVPDRFSGSGS | (ADI-57318) | |
| | | GTDFTLTISSLQAEDVAVYYCKQSYSRRTFGGGTKVE | | |
| | | IK | | |
| Ab7 | 72 | QVQLVQSGAEVKKPGASVKVSCKASGYTFTQYSMH | SAD10319_P02_H05 | HC amino acid sequence |
| | | WVRQAPGQRLEWMGWINAGTGDTVYSQKFQGRVTI | (ADI-57319) | |
| | | TRDTSASTAYMELSSLRSEDTAVYYCARDHHGRYFY | | |
| | | DVWGQGTLVTVSS | | |
| Ab7 | 73 | DIVMTQSPDSLAVSLGERATINCKSSQSLFNARTGKN | SAD10319_P02_H05 | LC amino acid sequence |
| | | YLAWYQQKPGQPPKLLIYWASTRESGVPDRFSGSGS | (ADI-57319) | |
| | | GTDFTLTISSLQAEDVAVYYCKQSYSRRTFGGGTKVE | | |
| | | IK | | |
| Ab8 | 74 | QVQLVQSGAEVKKPGASVKVSCKASGYTFDAYAMH | SAD10319_P02_A06 | HC amino acid sequence |
| | | WVRQAPGQRLEWMGWIDAGTGATKYSQKFQGRVTI | (ADI-57320) | |
| | | TRDTSASTAYMELSSLRSEDTAVYYCARDHYGHYFY | | |
| | | DVWGQGTLVTVSS | | |
| Ab8 | 75 | DIVMTQSPDSLAVSLGERATINCKSSQSLLNARTGKN | SAD10319_P02_A06 | LC amino acid sequence |
| | | YLAWYQQKPGQPPKLLIYWASTRESGVPDRFSGSGS | (ADI-57320) | |
| | | GTDFTLTISSLQAEDVAVYYCKQSYSRRTFGGGTKVE | | |
| | | IK | | |
| Ab9 | 76 | QVQLVQSGAEVKKPGASVKVSCKASGYTFTSYTMH | SAD10319_P02_B06 | HC amino acid sequence |
| | | WVRQAPGQRPEWMGSINAGTGFTDYSQKFQGRVTIT | (ADI-57321) | |
| | | RDTSASTAYMELSSLRSEDTAVYYCARDHYGHYFYD | | |
| | | VWGQGTLVTVSS | | |
| Ab9 | 77 | DIVMTQSPDSLAVSLGERATINCKSSQSLLNARTGKN | SAD10319_P02_B06 | LC amino acid sequence |
| | | YLAWYQQKPGQPPKLLIYWASTRESGVPDRFSGSGS | (ADI-57321) | |
| | | GTDFTLTISSLQAEDVAVYYCKQSYSRRTFGGGTKVE | | |
| | | IK | | |
| Ab10 | 78 | QVQLVQSGAEVKKPGASVKVSCKASGYTFTSYAMH | SAD10319_P02_C06 | HC amino acid sequence |
| | | WVRQAPGQRLEWMGWINPVTGATVYSQKFQGRVTI | (ADI-57322) | |
| | | TRDTSASTAYMELSSLRSEDTAVYYCARDAYGHYFY | | |
| | | DVWGQGTLVTVSS | | |
| Ab10 | 79 | DIVMTQSPDSLAVSLGERATINCKSSQSLLNARTGKN | SAD10319_P02_C06 | LC amino acid sequence |
| | | YLAWYQQKPGQPPKLLIYWASTRESGVPDRFSGSGS | (ADI-57322) | |
| | | GTDFTLTISSLQAEDVAVYYCKQSYSRRTFGGGTKVE | | |
| | | IK | | |
| Ab11 | 80 | QVQLVQSGAEVKKPGASVKVSCKASGYTFTDYAMH | SAD10319_P02_D06 | HC amino acid sequence |
| | | WVRQAPGQRLEWMGWINAGTGATIYSQKFQGRVTI | (ADI-48631) | |
| | | TRDTSASTAYMELSSLRSEDTAVYYCARDAYHHYFY | | |
| | | DVWGQGTLVTVSS | | |
| Ab11 | 81 | DIVMTQSPDSLAVSLGERATINCKSSQSLLNARTGKN | SAD10319_P02_D06 | LC amino acid sequence |
| | | YLAWYQQKPGQPPKLLIYWASTRESGVPDRFSGSGS | (ADI-48631) | |
| | | GTDFTLTISSLQAEDVAVYYCKQSYSRRTFGGGTKVE | | |
| | | IK | | |
| Ab12 | 82 | QVQLVQSGAEVKKPGASVKVSCKASGYTFADYAMH | SAD10319_P02_E06 | HC amino acid sequence |
| | | WVRQAPGQRLAWMGWINPHTGATFYSQKFQGRVTI | (ADI-57323) | |
| | | TRDTSASTAYMELSSLRSEDTAVYYCARDAYGRYFY | | |
| | | DHWGQGTLVTVSS | | |
| Ab12 | 83 | DIVMTQSPDSLAVSLGERATINCKSSQSLLNARTGKN | SAD10319_P02_E06 | LC amino acid sequence |
| | | YLAWYQQKPGQPPKLLIYWASTRESGVPDRFSGSGS | (ADI-57323) | |
| | | GTDFTLTISSLQAEDVAVYYCKQSYSRRTFGGGTKVE | | |
| | | IK | | |
| Ab13 | 84 | QVQLVQSGAEVKKPGASVKVSCKASGYTFLSYAMH | SAD10319_P02_F06 | HC amino acid sequence |
| | | WVRQAPGQRLERMGWINPSTGATDYSQKFQGRVTIT | (ADI-57324) | |
| | | RDTSASTAYMELSSLRSEDTAVYYCARDAYGHYFYD | | |
| | | VWGQGTLVTVSS | | |
| Ab13 | 85 | DIVMTQSPDSLAVSLGERATINCKSSQSLLNARTGKN | SAD10319_P02_F06 | LC amino acid sequence |
| | | YLAWYQQKPGQPPKLLIYWASTRESGVPDRFSGSGS | (ADI-57324) | |
| | | GTDFTLTISSLQAEDVAVYYCKQSYSRRTFGGGTKVE | | |
| | | IK | | |
| Ab14 | 86 | QVQLVQSGAEVKKPGASVKVSCKASGFNIKDYYMH | SAD10318_P01_F02 | HC amino acid sequence |
| | | WVRQAPGQRLEWMGWIDLENANTIYDAKFQGRVTI | (ADI-48585) | |
| | | TRDTSASTAYMELSSLRSEDTAVYYCARDAHGHYFY | | |
| | | DVWGQGTLVTVSS | | |
| Ab14 | 87 | DIVMTQSPDSLAVSLGERATINCKSSQSLLNAHTGKN | SAD10318_P01_F02 | LC amino acid sequence |
| | | HLAWYQQKPGQPPKLLIYWASTRESGVPDRFSGSGS | (ADI-48585) | |
| | | GTDFTLTISSLQAEDVAVYYCKQSHSHRTFGGGTKVE | | |
| | | IK | | |
| Ab15 | 88 | QVQLVQSGAEVKKPGASVKVSCKASGYTFTSYAMH | SAD10319_P02_G06 | HC amino acid sequence |
| | | WVRQAPGQRLEWMGWINPDTGATVYSQKFQGRVTI | (ADI-48632) | |
| | | TRDTSASTAYMELSSLRSEDTAVYYCARDAYHHYFY | | |
| | | DVWGQGTLVTVSS | | |
| Ab15 | 89 | DIVMTQSPDSLAVSLGERATINCKSSQSLLNARTGKN | SAD10319_P02_G06 | LC amino acid sequence |
| | | YLAWYQQKPGQPPKLLIYWASTRESGVPDRFSGSGS | (ADI-48632) | |
| | | GTDFTLTISSLQAEDVAVYYCKQSYSRRTFGGGTKVE | | |
| | | IK | | |
| Ab16 | 90 | QVQLVQSGAEVKKPGASVKVSCKASGYTFTAYVMH | SAD10319_P02_H06 | HC amino acid sequence |
| | | WVRQAPGQRLEWMGSIDAGTGNTKYSQKFQGRVTI | (ADI-48633) | |
| | | TRDTSASTAYMELSSLRSEDTAVYYCARDAYGHYFY | | |
| | | DHWGQGTLVTVSS | | |
| Ab16 | 91 | DIVMTQSPDSLAVSLGERATINCKSSQSLLNARTGKN | SAD10319_P02_H06 | LC amino acid sequence |
| | | YLAWYQQKPGQPPKLLIYWASTRESGVPDRFSGSGS | (ADI-48633) | |
| | | GTDFTLTISSLQAEDVAVYYCKQSYSRRTFGGGTKVE | | |
| | | IK | | |
| Ab17 | 92 | QVQLVQSGAEVKKPGASVKVSCKASGYTFESYDMH | SAD10319_P03_C07 | HC amino acid sequence |
| | | WVRQAPGQRLEWMGWIDAGTGATTYSQKFQGRVTI | (ADI-48634 and | |
| | | TRDTSASTAYMELSSLRSEDTAVYYCARDAYHHYFY | ADI-48635) | |
| | | DVWGQGTLVTVSS | | |
| Ab17 | 93 | DIVMTQSPDSLAVSLGERATINCKSSQSLLNARTGKN | SAD10319_P03_C07 | LC amino acid sequence |
| | | YLAWYQQKPGQPPKLLIYWASTRESGVPDRFSGSGS | (ADI-48634 and | |
| | | GTDFTLTISSLQAEDVAVYYCKQSYSRRTFGGGTKVE | ADI-48635) | |
| | | IK | | |
| Ab18 | 94 | QVQLVQSGAEVKKPGASVKVSCKASGYTFDSYLMH | SAD10319_P03_G07 | HC amino acid sequence |
| | | WVRQAPGQRLEWMGWIDAGTGATNYSQKFQGRVTI | (ADI-57325) | |
| | | TRDTSASTAYMELSSLRSEDTAVYYCARDAHGHYFY | | |
| | | DVWGQGTLVTVSS | | |
| Ab18 | 95 | DIVMTQSPDSLAVSLGERATINCKSSQSLLNARTGKN | SAD10319_P03_G07 | LC amino acid sequence |
| | | YLAWYQQKPGQPPKLLIYWASTRESGVPDRFSGSGS | (ADI-57325) | |
| | | GTDFTLTISSLQAEDVAVYYCKQSYSRRTFGGGTKVE | | |
| | | IK | | |
| Ab19 | 96 | QVQLVQSGAEVKKPGASVKVSCKASGYTFNSYDMH | SAD10319_P03_H07 | HC amino acid sequence |
| | | WVRQAPGQRLEWMGWINPYTGETKYSQKFQGRVTI | (ADI-57326) | |
| | | TRDTSASTAYMELSSLRSEDTAVYYCARDHYGHYFY | | |
| | | DVWGQGTLVTVSS | | |
| Ab19 | 97 | DIVMTQSPDSLAVSLGERATINCKSSQSLLNARTGKN | SAD10319_P03_H07 | LC amino acid sequence |
| | | YLAWYQQKPGQPPKLLIYWASTRESGVPDRFSGSGS | (ADI-57326) | |
| | | GTDFTLTISSLQAEDVAVYYCKQSYSRRTFGGGTKVE | | |
| | | IK | | |
| Ab20 | 98 | QVQLVQSGAEVKKPGASVKVSCKASGYTFYSYEMH | SAD10319_P03_D08 | HC amino acid sequence |
| | | WVRQAPGQRLDWMGWINPQTGATKYSQKFQGRVTI | (ADI-57327) | |
| | | TRDTSASTAYMELSSLRSEDTAVYYCARDAYHHYFY | | |
| | | DVWGQGTLVTVSS | | |
| Ab20 | 99 | DIVMTQSPDSLAVSLGERATINCKSSQSLLNARTGKN | SAD10319_P03_D08 | LC amino acid sequence |
| | | YLAWYQQKPGQPPKLLIYWASTRESGVPDRFSGSGS | (ADI-57327) | |
| | | GTDFTLTISSLQAEDVAVYYCKQSYSRRTFGGGTKVE | | |
| | | IK | | |
| Ab21 | 100 | QVQLVQSGAEVKKPGASVKVSCKASGYTFNDYAMH | SAD10319_P03_E08 | HC amino acid sequence |
| | | WVRQAPGQRLEWMGYINGTGATVYSQKFQGRVTI | (ADI-48637) | |
| | | TRDTSASTAYMELSSLRSEDTAVYYCARDAYHHYFY | | |
| | | DVWSQGTLVTVSS | | |
| Ab21 | 101 | DIVMTQSPDSLAVSLGERATINCKSSQSLLNARTGKN | SAD10319_P03_E08 | LC amino acid sequence |
| | | YLAWYQQKPGQPPKLLIYWASTRESGVPDRFSGSGS | (ADI-48637) | |
| | | GTDFTLTISSLQAEDVAVYYCKQSYSRRTFGGGTKVE | | |
| | | IK | | |
| Ab22 | 102 | QVQLVQSGAEVKKPGASVKVSCKASGYTFSSYDMH | SAD10319_P03_G08 | HC amino acid sequence |
| | | WVRQAPGQRLEWMGWIDAGTGFTKYSQKFQGRVTI | (ADI-48638) | |
| | | TRDTSASTAYMELSSLRSEDTAVYYCARDAYGHYFY | | |
| | | DHWGQGTLVTVSS | | |
| Ab22 | 103 | DIVMTQSPDSLAVSLGERATINCKSSQSLLNARTGKN | SAD10319_P03_G08 | LC amino acid sequence |
| | | YLAWYQQKPGQPPKLLIYWASTRESGVPDRFSGSGS | (ADI-48638) | |
| | | GTDFTLTISSLQAEDVAVYYCKQSYSRRTFGGGTKVE | | |
| | | IK | | |
| Ab23 | 104 | QVQLVQSGAEVKKPGASVKVSCKASGYTFKSYDMH | SAD10319_P03_H08 | HC amino acid sequence |
| | | WVRQAPGQRPEWMGWINAGTGNTVYSQKFQGRVTI | (ADI-57328) | |
| | | TRDTSASTAYMELSSLRSEDTAVYYCARDAYHRYFY | | |
| | | DVWGQGTLVTVSS | | |
| Ab23 | 105 | DIVMTQSPDSLAVSLGERATINCKSSQSLLNARTGKN | SAD10319_P03_H08 | LC amino acid sequence |
| | | YLAWYQQKPGQPPKLLIYWASTRESGVPDRFSGSGS | (ADI-57328) | |
| | | GTDFTLTISSLQAEDVAVYYCKQSYSRRTFGGGTKVE | | |
| | | IK | | |
| Ab24 | 106 | QVQLVQSGAEVKKPGASVKVSCKASGYTFTEYDMH | SAD10319_P03_B09 | HC amino acid sequence |
| | | WVRQAPGQRLEWMGWIDAGTGATVYSQKFQGRVTI | (ADI-48639) | |
| | | TRDTSASTAYMELSSLRSEDTAVYYCARDAYGRYFY | | |
| | | DHWGQGTLVTVSS | | |
| Ab24 | 107 | DIVMTQSPDSLAVSLGERATINCKSSQSLLNARTGKN | SAD10319_P03_B09 | LC amino acid sequence |
| | | YLAWYQQKPGQPPKLLIYWASTRESGVPDRFSGSGS | (ADI-48639) | |
| | | GTDFTLTISSLQAEDVAVYYCKQSYSRRTFGGGTKVE | | |
| | | IK | | |
| Ab25 | 108 | QVQLVQSGAEVKKPGASVKVSCKASGFNIKDYYMH | SAD10318_P01_G02 | HC amino acid sequence |
| | | WVRQAPGQRLEWMGWIDLENANTIYDAKFQGRVTI | (ADI-48586) | |
| | | TRDTSASTAYMELSSLRSEDTAVYYCARDAYHHYFY | | |
| | | DVWGQGTLVTVSS | | |
| Ab25 | 109 | DIVMTQSPDSLAVSLGERATINCKSSQSLLNARTGKN | SAD10318_P01_G02 | LC amino acid sequence |
| | | HLAWYQQKPGQPPKLLIYWASTRESGVPDRFSGSGS | (ADI-48586) | |
| | | GTDFTLTISSLQAEDVAVYYCKQSYSHRTFGGGTKVE | | |
| | | IK | | |
| Ab26 | 110 | QVQLVQSGAEVKKPGASVKVSCKASGYTFLSYDMH | SAD10319_P03_E09 | HC amino acid sequence |
| | | WVRQAPGQRLEWMGWIDAGTGATTYSQKFQGRVTI | (ADI-48640) | |
| | | TRDTSASTAYMELSSLRSEDTAVYYCARDAYHHYFY | | |
| | | DVWGQGTLVTVSS | | |
| Ab26 | 111 | DIVMTQSPDSLAVSLGERATINCKSSQSLLNARTGKN | SAD10319_P03_E09 | LC amino acid sequence |
| | | YLAWYQQKPGQPPKLLIYWASTRESGVPDRFSGSGS | (ADI-48640) | |
| | | GTDFTLTISSLQAEDVAVYYCKQSYSRRTFGGGTKVE | | |
| | | IK | | |
| Ab27 | 112 | QVQLVQSGAEVKKPGASVKVSCKASGYTFPSYPMH | SAD10319_P03_F09 | HC amino acid sequence |
| | | WVRQAPGQRLDWMGWINPDTGATVYSQKFQGRVTI | (ADI-57329) | |
| | | TRDTSASTAYMELSSLRSEDTAVYYCARDAYHHYFY | | |
| | | DVWGQGTLVTVSS | | |
| Ab27 | 113 | DIVMTQSPDSLAVSLGERATINCKSSQSPLNARTGKN | SAD10319_P03_F09 | LC amino acid sequence |
| | | YLAWYQQKPGQPPKLLIYWASTRESGVPDRFSGSGS | (ADI-57329) | |
| | | GTDFTLTISSLQAEDVAVYYCKQSYSRRTFGGGTKVE | | |
| | | IK | | |
| Ab28 | 114 | QVQLVQSGAEVKKPGASVKVSCKASGYTFTSYDMH | SAD10319_P03_G09 | HC amino acid sequence |
| | | WVRQAPGQRLEWMGWIDPHTGATKYSQKFQGRVTI | (ADI-57300) | |
| | | TRDTSASTAYMELSSLRSEDTAVYYCARDAYGRYFY | | |
| | | DHWGQGTLVTVSS | | |
| Ab28 | 115 | DIVMTQSPDSLAVSLGERATINCKSSQSLLNARTGKN | SAD10319_P03_G09 | LC amino acid sequence |
| | | YLAWYQQKPGQPPKLLIYWASTRESGVPDRFSGSGS | (ADI-57300) | |
| | | GTDFTLTISSLQAEDVAVYYCKQSYSRRTFGGGTKVE | | |
| | | IK | | |
| Ab29 | 116 | QVQLVQSGAEVKKPGASVKVSCKASGYTFTSDAMH | SAD10319_P04_A10 | HC amino acid sequence |
| | | WVRQAPGQRLAWMGYINAGTGTTKYSQKFQGRVTI | (ADI-57331) | |
| | | TRDTSASTAYMELSSLRSEDTAVYYCAHDAYGHYFY | | |
| | | DVWGQGTLVTVSS | | |
| Ab29 | 117 | DIVMTQSPDSLAVSLGERATINCKSSQSLLNARTGKN | SAD10319_P04_A10 | LC amino acid sequence |
| | | YLAWYQQKPGQPPKLLIYWASTRESGVPDRFSGSGS | (ADI-57331) | |
| | | GTDFTLTISSLQAEDVAVYYCKQSYSRRTFGGGTKVE | | |
| | | IK | | |
| Ab30 | 118 | QVQLVQSGAEVKKPGASVKVSCKASGYTFTSTFMH | SAD10319_P04_B10 | HC amino acid sequence |
| | | WVRQAPGQRLEWMGFIDAGTGATKYSQKFQGRVTI | (ADI-57332) | |
| | | TRDTSASTAYMELSSLRSEDTAVYYCARDAYGHYFY | | |
| | | DHWGQGTLVTVSS | | |
| Ab30 | 119 | DIVMTQSPDSLAVSLGERATINCKSSQSLLNARTGKN | SAD10319_P04_B10 | LC amino acid sequence |
| | | YLAWYQQKPGQPPKLLIYWASTRESGVPDRFSGSGS | (ADI-57332) | |
| | | GTDFTLTISSLQAEDVAVYYCKQSYSRRTFGGGTKVE | | |
| | | IK | | |
| Ab31 | 120 | QVQLVQSGAEVKKPGASVKVSCKASGYTFTDYSMH | SAD10319_P04_C10 | HC amino acid sequence |
| | | WVRQAPGQRLEWMGSINAGTGITKYSQKFQGRVTIT | (ADI-57333) | |
| | | RDTSASTAYMELSSLRSEDTAVYYCARDAHGRYFYD | | |
| | | VWGQGTLVTVSS | | |
| Ab31 | 121 | DIVMTQSPDSLAVSLGERATINCKSSQSLLNARTGKN | SAD10319_P04_C10 | LC amino acid sequence |
| | | YLAWYQQKPGQPPKLLIYWASTRESGVPDRFSGSGS | (ADI-57333) | |
| | | GTDFTLTISSLQAEDVAVYYCKQSYSRRTFGGGTKVE | | |
| | | IK | | |
| Ab32 | 122 | QVQLVQSGAEVKKPGASVKVSCKASGYTFTDYYMH | SAD10319_P04_G10 | HC amino acid sequence |
| | | WVRQAPGQRLEWMGWINPATGATAYSQKFQGRVTI | (ADI-57334) | |
| | | TRDTSASTAYMELSSLRSEDTAVYYCARDAYGHHFY | | |
| | | DVWGQGTLVTVSS | | |
| Ab32 | 123 | DIVMTQSPDSLAVSLGERATINCKSSQSLLNARTGKN | SAD10319_P04_G10 | LC amino acid sequence |
| | | YLAWYQQKPGQPPKLLIYWASTRESGVPDRFSGSGS | (ADI-57334) | |
| | | GTDFTLTISSLQAEDVAVYYCKQSYSRRTFGGGTKVE | | |
| | | IK | | |
| Ab33 | 124 | QVQLVQSGAEVKKPGASVKVSCKASGYTFGSYDMH | SAD10319_P04_B11 | HC amino acid sequence |
| | | WVRQAPGQRLEWMGWIDAGTGATKYSQKFQGRVTI | (ADI-57335) | |
| | | TRDTSASTAYMELSSLRSEDTAVYYCARDAHGHYFY | | |
| | | DVWGQGTLVTVSS | | |
| Ab33 | 125 | DIVMTQSPDSLAVSLGERATINCKSSQSLLNARTGKN | SAD10319_P04_B11 | LC amino acid sequence |
| | | YLAWYQQKPGQPPKLLIYWASTRESGVPDRFSGSGS | (ADI-57335) | |
| | | GTDFTLTISSLQAEDVAVYYCKQSYSRRTFGGGTKVE | | |
| | | IK | | |
| Ab34 | 126 | QVQLVQSGAEVKKPGASVKVSCKASGYTFHSYEMH | SAD10319_P04_C11 | HC amino acid sequence |
| | | WVRQAPGQRLEWMGWINPSTGSTKYSQKFQGRVTIT | (ADI-57336) | |
| | | RDTSASTAYMELSSLRSEDTAVYYCARDAYGRYFYD | | |
| | | HWGQGTLVTVSS | | |
| Ab34 | 127 | DIVMTQSPDSLAVSLGERATINCKSSQSLLNARTGKN | SAD10319_P04_C11 | LC amino acid sequence |
| | | YLAWYQQKPGQPPKLLIYWASTRESGVPDRFSGSGS | (ADI-57336) | |
| | | GTDFTLTISSLQAEDVAVYYCKQSYSRRTFGGGTKVE | | |
| | | IK | | |
| Ab35 | 128 | QVQLVQSGAEVKKPGASVKVSCKASGYTFNSYRMH | SAD10319_P04_D11 | HC amino acid sequence |
| | | WVRQAPGQRLEWMGSIDAGTGNTKYSQKFQGRVTI | (ADI-57337) | |
| | | TRDTSASTAYMELSSLRSEDTAVYYCARDAYGRYFY | | |
| | | DHWGQGTLVTVSS | | |
| Ab35 | 129 | DIVMTQSPDSLAVSLGERATINCKSSQSLLNARTGKN | SAD10319_P04_D11 | LC amino acid sequence |
| | | YLAWYQQKPGQPPKLLIYWASTRESGVPDRFSGSGS | (ADI-57337) | |
| | | GTDFTLTISSLQAEDVAVYYCKQSYSRRTFGGGTKVE | | |
| | | IK | | |
| Ab36 | 130 | QVQLVQSGAEVKKPGASVKVSCKASGFNIKDYYMH | SAD10318_P01_A03 | HC amino acid sequence |
| | | WVRQAPGQRLEWMGWIDLENANTIYDAKFQGRVTI | (ADI-48587) | |
| | | TRDTSASTAYMELSSLRSEDTAVYYCARDHYHRYFY | | |
| | | DVWGQGTLVTVSS | | |
| Ab36 | 131 | DIVMTQSPDSLAVSLGERATINCKSSQSLLNARTGHN | SAD10318_P01_A03 | LC amino acid sequence |
| | | YLAWYQQKPGQPPKLLIYWASTRESGVPDRFSGSGS | (ADI-48587) | |
| | | GTDFTLTISSLQAEDVAVYYCKQSHSHRTFGGGTKVE | | |
| | | IK | | |
| Ab37 | 132 | QVQLVQSGAEVKKPGASVKVSCKASGYTFTDYNMH | SAD10319_P04_E11 | HC amino acid sequence |
| | | WVRQAPGQRLEWMGWINPYTGYTKYSQKFQGRVTI | (ADI-57338) | |
| | | TRDTSASTAYMELSSLRSEDTAVYYCARDHYGHYFY | | |
| | | DVWGQGTLVTVSS | | |
| Ab37 | 133 | DIVMTQSPDSLAVSLGERATINCKSSQSLLNARTGKN | SAD10319_P04_E11 | LC amino acid sequence |
| | | YLAWYQQKPGQPPKLLIYWASTRESGVPDRFSGSGS | (ADI-57338) | |
| | | GTDFTLTISSLQAEDVAVYYCKQSYSRRTFGGGTKVE | | |
| | | IK | | |
| Ab38 | 134 | QVQLVQSGAEVKKPGASVKVSCKASGYTFTDYNMH | SAD10319_P04_F11 | HC amino acid sequence |
| | | WVRQAPGQRLQWMGWINPYTGYTKYSQKFQGRVTI | (ADI-57339) | |
| | | TRDTSASTAYMELSSLRSEDTAVYYCARDHYGHYFY | | |
| | | DVWGQGTLVTVSS | | |
| Ab38 | 135 | DIVMTQSPDSLAVSLGERATINCKSSQSLLNARTGKN | SAD10319_P04_F11 | LC amino acid sequence |
| | | YLAWYQQKPGQPPKLLIYWASTRESGVPDRFSGSGS | (ADI-57339) | |
| | | GTDFTLTISSLQAEDVAVYYCKQSYSRRTFGGGTKVE | | |
| | | IK | | |
| Ab39 | 136 | QVQLVQSGAEVKKPGASVKVYCKASGYTFTTYEMH | SAD10319_P04_G11 | HC amino acid sequence |
| | | WVRQAPGQRLEWMGSINAGDANTKYSQKFQGRVTI | (ADI-48641) | |
| | | TRDTSASTAYMELSSLRSEDTAVYYCARDAYHHYFY | | |
| | | DVWGQGTLVTVSS | | |
| Ab39 | 137 | DIVMTQSPDSLAVSLGERATINCKSSQSLLNARTGKN | SAD10319_P04_G11 | LC amino acid sequence |
| | | YLAWYQQKPGQPPKLLIYWASTRESGVPDRFSGSGS | (ADI-48641) | |
| | | GTDFTLTISSLQAEDVAVYYCKQSYSRRTFGGGTKVE | | |
| | | IK | | |
| Ab40 | 138 | QVQLVQSGAEVKKPGASVKVSCKASGYTFTSYAMH | SAD10319_P04_B12 | HC amino acid sequence |
| | | WVRQAPGQRLEWMGWINPITGYTKYSQKFQGRVTIT | (ADI-57340) | |
| | | RDTSASTAYMELSSLRSEDTAVYYCARDAHGRYHY | | |
| | | DVWGQGTLVTVSS | | |
| Ab40 | 139 | DIVMTQSPDSLAVSLGERATINCKSSQSLLNARTGKN | SAD10319_P04_B12 | LC amino acid sequence |
| | | YLAWYQQKPGQPPKLLIYWASTRESGVPDRFSGSGS | (ADI-57340) | |
| | | GTDFTLTISSLQAEDVAVYYCKQSYSRRTFGGGTKVE | | |
| | | IK | | |
| Ab41 | 140 | QVQLVQSGAEVKKPGASVKVSCKASGYTFTAYDMH | SAD10319_P04_C12 | HC amino acid sequence |
| | | WVRQAPGQRLERMGWIDPITGNTKYSQKFQGRVTIT | (ADI-57341) | |
| | | RDTSASTAYMELSSLRSEDTAVYYCAHDAYGHYFYD | | |
| | | VWGQGTLVTVSS | | |
| Ab41 | 141 | DIVMTQSPDSLAVSLGERATINCKSSQSLLNARTGKN | SAD10319_P04_C12 | LC amino acid sequence |
| | | YLAWYQQKPGQPPKLLIYWASTRESGVPDRFSGSGS | (ADI-57341) | |
| | | GTDFTLTISSLQAEDVAVYYCKQSYSRRTFGGGTKVE | | |
| | | IK | | |
| Ab42 | 142 | QVQLVQSGAEVKKPGASVKVSCKASGYTFTSYAMH | SAD10319_P04_D12 | HC amino acid sequence |
| | | WVRQAPGQRLDWMGYINPDTGDTKYSQKFQGRVTI | (ADI-57342) | |
| | | TRDTSASTAYMELSSLRSEDTAVYYCARDAYHHYFY | | |
| | | DVWGQGTLVTVSS | | |
| Ab42 | 143 | DIVMTQSPDSLAVSLGERATINCKSSQSLLNARTGKN | SAD10319_P04_D12 | LC amino acid sequence |
| | | YLAWYQQKPGQPPKLLIYWASTRESGVPDRFSGSGS | (ADI-57342) | |
| | | GTDFTLTISSLQAEDVAVYYCKQSYSRRTFGGGTKVE | | |
| | | IK | | |
| Ab43 | 144 | QVQLVQSGAEVKKPGASVKVSCKASGYTFTSYPMH | SAD10319_P04_E12 | HC amino acid sequence |
| | | WVRQAPGQRLEWMGWIDAGTGLTTYSQKFQGRVTI | (ADI-48642) | |
| | | TRDTSASTAYMELSSLRSEDTAVYYCARDHYHRYFY | | |
| | | DMWGQGTLVTVSS | | |
| Ab43 | 145 | DIVMTQSPDSLAVSLGERATINCKSSQSLLNARTGKN | SAD10319_P04_E12 | LC amino acid sequence |
| | | YLAWYQQKPGQPPKLLIYWASTRESGVPDRFSGSGS | (ADI-48642) | |
| | | GTDFTLTISSLQAEDVAVYYCKQSYSRRTFGGGTKVE | | |
| | | IK | | |
| Ab44 | 146 | QVQLVQSGAEVKKPGASVKVSCKASGYTFNDYAMH | SAD10319_P04_F12 | HC amino acid sequence |
| | | WVRQAPGQRLDWMGWINPDTGNTNYSQKFQGRVTI | (ADI-57343) | |
| | | TRDTSASTAYMELSSLRSEDTAVYYCARDHYGRYFY | | |
| | | DHWGQGTLVTVSS | | |
| Ab44 | 147 | DIVMTQSPDSLAVSLGERATINCKSSQSLLNARTGKN | SAD10319_P04_F12 | LC amino acid sequence |
| | | YLAWYQQKPGQPPKLLIYWASTRESGVPDRFSGSGS | (ADI-57343) | |
| | | GTDFTLTISSLQAEDVAVYYCKQSYSRRTFGGGTKVE | | |
| | | IK | | |
| Ab45 | 148 | QVQLVQSGAEVKKPGASVKVSCKASGYTFTSDHMH | SAD10319_P04_H12 | HC amino acid sequence |
| | | WVRQAPGQRLEWMGSINAGTGATKYSQKFQGRVTI | (ADI-57344) | |
| | | TRDTSASTAYMELSSLRSEDTAVYYCARDAYGHYFY | | |
| | | DHWGQGTLVTVSS | | |
| Ab45 | 149 | DIVMTQSPDSLAVSLGERATINCKSSQSLLNARTGKN | SAD10319_P04_H12 | LC amino acid sequence |
| | | YLAWYQQKPGQPPKLLIYWASTRESGVPDRFSGSGS | (ADI-57344) | |
| | | GTDFTLTISSLQAEDVAVYYCKQSYSRRTFGGGTKVE | | |
| | | IK | | |
| Ab46 | 150 | QVQLVQSGAEVKKPGASVKVSCKASGFNIKDYYMH | SAD10320_P01_B01 | HC amino acid sequence |
| | | WVRQAPGQRLEWMGWIDLENANTIYDAKFQGRVTI | (ADI-48643) | |
| | | TRDTSASTAYMELSSLRSEDTAVYYCARDAYGHIFY | | |
| | | DVWGQGTLVTVSS | | |
| Ab46 | 151 | DIVMTQSPDSLAVSLGERATINCKSSQSLLNARTGKN | SAD10320_P01_B01 | LC amino acid sequence |
| | | YLAWYQQKPGQPPKLLIYWASTRESGVPDRFSGSGS | (ADI-48643) | |
| | | GTDFTLTISSLQAEDVAVYYCKQSYVHRTFGGGTKV | | |
| | | EIK | | |
| Ab47 | 152 | QVQLVQSGAEVKKPGASVKVSCKASGFNIKDYYMH | SAD10318_P01_C03 | HC amino acid sequence |
| | | WVRQAPGQRLEWMGWIDLENANTIYDAKFQGRVTI | (ADI-57271) | |
| | | TRDTSASTAYMELSSLRSEDTAVYYCARDAHGRYHY | | |
| | | DVWGQGTLVTVSS | | |
| Ab47 | 153 | DIVMTQSPDSLAVSLGERATINCKSSQSLLNRHTGKN | SAD10318_P01_C03 | LC amino acid sequence |
| | | YLAWYQQKPGQPPKLLIYWASTRESGVPDRFSGSGS | (ADI-57271) | |
| | | GTDFTLTISSLQAEDVAVYYCKQSYSRRTFGGGTKVE | | |
| | | I | | |
| Ab48 | 154 | QVQLVQSGAEVKKPGASVKVSCKASGFNIKDYYMH | SAD10320_P01_D01 | HC amino acid sequence |
| | | WVRQAPGQRLEWMGWIDLENANTIYDAKFQGRVTI | (ADI-48644) | |
| | | TRDTSASTAYMELSSLRSEDTAVYYCARDAYGHGFY | | |
| | | DVWGQGTLVTVSS | | |
| Ab48 | 155 | DIVMTQSPDSLAVSLGERATINCKSSQSLLNARTGKN | SAD10320_P01_D01 | LC amino acid sequence |
| | | YLAWYQQKPGQPPKLLIYWASTRESGVPDRFSGSGS | (ADI-48644) | |
| | | GTDFTLTISSLQAEDVAVYYCKQSYSHRTFGGGTKVE | | |
| | | IK | | |
| Ab49 | 156 | QVQLVQSGAEVKKPGASVKVSCKASGFNIKDYYMH | SAD10320_P01_E01 | HC amino acid sequence |
| | | WVRQAPGQRLEWMGWIDLENANTIYDAKFQGRVTI | (ADI-48645) | |
| | | TRDTSASTAYMELSSLRSEDTAVYYCARDAYGHVFY | | |
| | | DVWGQGTLVTVSS | | |
| Ab49 | 157 | DIVMTQSPDSLAVSLGERATINCKSSQSLLNARTGKN | SAD10320_P01_E01 | LC amino acid sequence |
| | | YLAWYQQKPGQPPKLLIYWASTRESGVPDRFSGSGS | (ADI-48645) | |
| | | GTDFTLTISSLQAEDVAVYYCKQSYKHRTFGGGTKV | | |
| | | EIK | | |
| Ab50 | 158 | QVQLVQSGAEVKKPGASVKVSCKASGFNIKDYYMH | SAD10320_P01_F01 | HC amino acid sequence |
| | | WVRQAPGQRPAWMGWIDLENANTIYDAKFQGRVTI | (ADI-57345) | |
| | | TRDTSASTAYMELSSLRSEDTAVYYCARDASHRYFY | | |
| | | DVWGQGTLVTVSS | | |
| Ab50 | 159 | DIVMTQSPDSLAVSLGERATINCKSSQSLLNARTGKN | SAD10320_P01_F01 | LC amino acid sequence |
| | | YLAWYQQKPGQPPKLLIYWASTRESGVPDRFSGSGS | (ADI-57345) | |
| | | GTDFTLTISSLQAEDVAVYYCGHSYSRRTFGGGTKVE | | |
| | | IK | | |
| Ab51 | 160 | QVQLVQSGAEVKKPGASVKVSCKASGFNIKDYYMH | SAD10320_P01_G01 | HC amino acid sequence |
| | | WVRQAPGQRLEWMGWIDLENANTIYDAKFQGRVTI | (ADI-57346) | |
| | | TRDTSASTAYMELSSLRSEDTAVYYCARDAYGHSFY | | |
| | | DVWGQGTLVTVSS | | |
| Ab51 | 161 | DIVMTQSPDSLAVSLGERATINCKSSQSLLNARTGKN | SAD10320_P01_G01 | LC amino acid sequence |
| | | YLAWYQQKPGQPPKLLIYWASTRESGVPDRFSGSGS | (ADI-57346) | |
| | | GTDFTLTISSLQAEDVAVYYCKQSYHLRTFGGGTKV | | |
| | | EIK | | |
| Ab52 | 162 | QVQLVQSGAEVKKPGASVKVSCKASGFNIKDYYMH | SAD10320_P01_H01 | HC amino acid sequence |
| | | WVRQAPGQRLDWMGWIDLENANTIYDAKFQGRVTI | (ADI-57347) | |
| | | TRDTSASTAYMELSSLRSEDTAVYYCARDAYGHNFY | | |
| | | DVWGQGTLVTVSS | | |
| Ab52 | 163 | DIVMTQSPDSLAVSLGERATINCKSSQSLLNARTGKN | SAD10320_P01_H01 | LC amino acid sequence |
| | | YLAWYQQKPGQPPKLLIYWASTRESGVPDRFSGSGS | (ADI-57347) | |
| | | GTDFTLTISSLQAEDVAVYYCKQSYHKRTFGGGTKV | | |
| | | EIK | | |
| Ab53 | 164 | QVQLVQSGAEVKKPGASVKVSCKASGFNIKDYYMH | SAD10320_P01_A02 | HC amino acid sequence |
| | | WVRQAPGQRLEWMGWIDLENANTIYDAKFQGRVTI | (ADI-48646) | |
| | | TRDTSASTAYMELSSLRSEDTAVYYCARDAYPHYFY | | |
| | | DVWGQGTLVTVSS | | |
| Ab53 | 165 | DIVMTQSPDSLAVSLGERATINCKSSQSLLNARTGKN | SAD10320_P01_A02 | LC amino acid sequence |
| | | YLAWYQQKPGQPPKLLIYWASTRESGVPDRFSGSGS | (ADI-48646) | |
| | | GTDFTLTISSLQAEDVAVYYCKQSYHERTFGGGTKV | | |
| | | EIK | | |
| Ab54 | 166 | QVQLVQSGAEVKKPGASVKVSCKASGFNIKDYYMH | SAD10320_P01_C02 | HC amino acid sequence |
| | | WVRQAPGQRLDWMGWIDLENANTIYDAKFQGRVTI | (ADI-57348) | |
| | | TRDTSASTAYMELSSLRSEDTAVYYCARDAGHRYFY | | |
| | | DVWGQGTLVTVSS | | |
| Ab54 | 167 | DIVMTQSPDSLAVSLGERATINCKSSQSLLNARPGKN | SAD10320_P01_C02 | LC amino acid sequence |
| | | YLAWYQQKPGQPPKLLIYWASTRESGVPDRFSGSGS | (ADI-57348) | |
| | | GTDFTLTISSLQAEDVAVYYCGHSYSRRTFGGGTKVE | | |
| | | IK | | |
| Ab55 | 168 | QVQLVQSGAEVKKPGASVKVSCKASGFNIKDYYMH | SAD10320_P01_E02 | HC amino acid sequence |
| | | WVRQAPGQRLAWMGWIDLENANTIYDAKFQGRVTI | (ADI-57349) | |
| | | TRDTSASTAYMELSSLRSEDTAVYYCARDAYGRHFY | | |
| | | DVWGQGTLVTVSS | | |
| Ab55 | 169 | DIVMTQSPDSLAVSLGERATINCKSSQSLLNARTGKN | SAD10320_P01_E02 | LC amino acid sequence |
| | | YLAWYQQKPGQPPKLLIYWASTRESGVPDRFSGSGS | (ADI-57349) | |
| | | GTDFTLTISSLQAEDVAVYYCKQSYSRRTFGGGTKVE | | |
| | | IK | | |
| Ab56 | 170 | QVQLVQSGAEVKKPGASVKVSCKASGFNIKDYYMH | SAD10320_P01_F02 | HC amino acid sequence |
| | | WVRQAPGQRLERMGWIDLENANTIYDAKFQGRVTIT | (ADI-57350) | |
| | | RDTSASTAYMELSSLRSEDTAVYYCARDAYGHTFYD | | |
| | | VWGQGTLVTVSS | | |
| Ab56 | 171 | DIVMTQSPDSLAVSLGERATINCKSSQSLLNARTGKN | SAD10320_P01_F02 | LC amino acid sequence |
| | | YLAWYQQKPGQPPKLLIYWASTRESGVPDRFSGSGS | (ADI-57350) | |
| | | GTDFTLTISSLQAEDVAVYYCKQSYWHRTFGGGTKV | | |
| | | EIK | | |
| Ab57 | 172 | QVQLVQSGAEVKKPGASVKVSCKASGFNIKDYYMH | SAD10320_P01_G02 | HC amino acid sequence |
| | | WVRQAPGQRLQWMGWIDLENANTIYDAKFQGRVTI | (ADI-57351) | |
| | | TRDTSASTAYMELSSLRSEDTAVYYCARDAYGHSFY | | |
| | | DVWGQGTLVTVSS | | |
| Ab57 | 173 | DIVMTQSPDSLAVSLGERATINCKSSQSLLNARTGKN | SAD10320_P01_G02 | LC amino acid sequence |
| | | YLAWYQQKPGQPPKLLIYWASTRESGVPDRFSGSGS | (ADI-57351) | |
| | | GTDFTLTISSLQAEDVAVYYCKQSYHERTFGGGTKV | | |
| | | EIK | | |
| Ab58 | 174 | QVQLVQSGAEVKKPGASVKVSCKASGFNIKDYYMH | SAD10318_P01_D03 | HC amino acid sequence |
| | | WVRQAPGQRLEWMGWIDLENANTIYDAKFQGRVTI | (ADI-48588) | |
| | | TRDTSASTAYMELSSLRSEDTAVYYCARDHYGHYFY | | |
| | | DVWGQGTLVTVSS | | |
| Ab58 | 175 | DIVMTQSPDSLAVSLGERATINCKSSQSLLNAHTGHN | SAD10318_P01_D03 | LC amino acid sequence |
| | | YLAWYQQKPGQPPKLLIYWASTRESGVPDRFSGSGS | (ADI-48588) | |
| | | GTDFTLTISSLQAEDVAVYYCKQSHSHRTFGGGTKVE | | |
| | | IK | | |
| Ab59 | 176 | QVQLVQSGAEVKKPGASVKVSCKASGFNIKDYYMH | SAD10320_P01_H02 | HC amino acid sequence |
| | | WVRQAPGQRLEWMGWIDLENANTIYDAKFQGRVTI | (ADI-57352) | |
| | | TRDTSASTAYMELSSLRSEDTAVYYCARDAYGHSFY | | |
| | | DVWGQGTLVTVSS | | |
| Ab59 | 177 | DIVMTQSPDSLAVSLGERATINCKSSQSLLNARTGKN | SAD10320_P01_H02 | LC amino acid sequence |
| | | YLAWYQQKPGQPPKLLIYWASTRESGVPDRFSGSGS | (ADI-57352) | |
| | | GTDFTLTISSLQAEDVAVYYCKQSMHRRTFGGGTKV | | |
| | | EI | | |
| Ab60 | 178 | QVQLVQSGAEVKKPGASVKVSCKASGFNIKDYYMH | SAD10320_P01_A03 | HC amino acid sequence |
| | | WVRQAPGQRLEWMGWIDLENANTIYDAKFQGRVTI | (ADI-57353) | |
| | | TRDTSASTAYMELSSLRSEDTAVYYCARDHRGRYFY | | |
| | | DVWGQGTLVTVSS | | |
| Ab60 | 179 | DIVMTQSPDSLAVSLGERATINCKSSQSLLNARTGKN | SAD10320_P01_A03 | LC amino acid sequence |
| | | YLAWYQQKPGQPPKLLIYWASTRESGVPDRFSGSGS | (ADI-57353) | |
| | | GTDFTLTISSLQAEDVAVYYCKQSSHRRTFGGGTKVE | | |
| | | IK | | |
| Ab61 | 180 | QVQLVQSGAEVKKPGASVKVSCKASGFNIKDYYMH | SAD10320_P01_B03 | HC amino acid sequence |
| | | WVRQAPGQRLEWMGWIDLENANTIYDAKFQGRVTI | (ADI-57354) | |
| | | TRDTSASTAYMELSSLRSDDTAVYYCARDQHGRYFY | | |
| | | DVWGQGTLVTVSS | | |
| Ab61 | 181 | DIVMTQSPDSLAVSLGERATINCKSSQSLLNARTGKN | SAD10320_P01_B03 | LC amino acid sequence |
| | | YLAWYQQKPGQPPKLLIYWASTRESGVPDRFSGSGS | (ADI-57354) | |
| | | GTDFTLTISSLQAEDVAVYYCKQSYSRRTFGGGTKVE | | |
| | | IK | | |
| Ab62 | 182 | QVQLVQSGAEVKKPGASVKVSCKASGFNIKDYYMH | SAD10320_P01_C03 | HC amino acid sequence |
| | | WVRQAPGQRLEWMGWIDLENANTIYDAKFQGRVTI | (ADI-57355) | |
| | | TRDTSASTAYMELSSLRSEDTAVYYCARDAYGHSFY | | |
| | | DVWGQGTLVTVSS | | |
| Ab62 | 183 | DIVMTQSPDSLAVSLGERATINCKSSQSLLNARTGKN | SAD10320_P01_C03 | LC amino acid sequence |
| | | YLAWYQQKPGQPPKLLIYWASTRESGVPDRFSGSGS | (ADI-57355) | |
| | | GTDFTLTISSLQAEDVAVYYCKQSYHWRTFGGGTKV | | |
| | | EIK | | |
| Ab63 | 184 | QVQLVQSGAEVKKPGASVKVSCKASGFDIKDYYMH | SAD10320_P01_D03 | HC amino acid sequence |
| | | WVRQAPGQRLEWMGWIDLENANTIYDAKFQGRVTI | (ADI-57356) | |
| | | TRDTSASTAYMELSSLRSEDTAVYYCARDAYGHAFY | | |
| | | DVWGQGTLVTVSS | | |
| Ab63 | 185 | DIVMTQSPDSLAVSLGERATINCKSSQSLLNARTGKN | SAD10320_P01_D03 | LC amino acid sequence |
| | | YLAWYQQKPGQPPKLLIYWASTRESGVPDRFSGSGS | (ADI-57356) | |
| | | GTDFTLTISSLQAEDVAVYYCKQSYHGRTFGGGTKV | | |
| | | EIK | | |
| Ab64 | 186 | QVQLVQSGAEVKKPGASVKVSCKASGFNIKDYYMH | SAD10320_P01_E03 | HC amino acid sequence |
| | | WVRQAPGQRLERMGWIDLENANTIYDAKFQGRVTIT | (ADI-57357) | |
| | | RDTSASTAYMELSSLRSEDTAVYYCARDAYGHGFYD | | |
| | | VWGQGTLVTVSS | | |
| Ab64 | 187 | DIVMTQSPDSLAVSLGERATINCKSSQSLLNARTGKN | SAD10320_P01_E03 | LC amino acid sequence |
| | | YLAWYQQKPGQPPKLLIYWASTRESGVPDRFSGSGS | (ADI-57357) | |
| | | GTDFTLTISSLQAEDVAVYYCKQSYRHRTFGGGTKV | | |
| | | EIK | | |
| Ab65 | 188 | QVQLVQSGAEVKKPGASVKVSCKASGFNIKDYYMH | SAD10320_P01_F03 | HC amino acid sequence |
| | | WVRQAPGQRLEWMGWIDLENANTIYDAKFQGRVTI | (ADI-48647) | |
| | | TRDTSASTAYMELSSLRSEDTAVYYCARDAYPHYFY | | |
| | | DVWGQGTLVTVSS | | |
| Ab65 | 189 | DIVMTQSPDSLAVSLGERATINCKSSQSLLNARTGKN | SAD10320_P01_F03 | LC amino acid sequence |
| | | YLAWYQQKPGQPPKLLIYWASTRESGVPDRFSGSGS | (ADI-48647) | |
| | | GTDFTLTISSLQAEDVAVYYCKQSYLHRTFGGGTKV | | |
| | | EIK | | |
| Ab66 | 190 | QVQLVQSGAEVKKPGASVKVSCKASGFNIKDYYMH | SAD10320_P01_G03 | HC amino acid sequence |
| | | WVRQAPGQRPEWMGWIDLENANTIYDAKFQGRVTI | (ADI-57358) | |
| | | TRDTSASTAYMELSSLRSEDTAVYYCARDAYGHSFY | | |
| | | DVWGQGTLVTVSS | | |
| Ab66 | 191 | DIVMTQSPDSLAVSLGERATINCKSSQSLLNARTGKN | SAD10320_P01_G03 | LC amino acid sequence |
| | | YLAWYQQKPGQPPKLLIYWASTRESGVPDRFSGSGS | (ADI-57358) | |
| | | GTDFTLTISSLQAEDVAVYYCKQSYHWRTFGGGTKV | | |
| | | EIK | | |
| Ab67 | 192 | QVQLVQSGAEVKKPGASVKVSCKASGFNIKDYYMH | SAD10320_P01_H03 | HC amino acid sequence |
| | | WVRQAPGQRPEWMGWIDLENANTIYDAKFQGRVTI | (ADI-57359) | |
| | | TRDTSASTAYMELSSLRSEDTAVYYCARDAAHRYFY | | |
| | | DVWGQGTLVTVSS | | |
| Ab67 | 193 | DIVMTQSPDSLAVSLGERATINCKSSQSLLNARPRKN | SAD10320_P01_H03 | LC amino acid sequence |
| | | YLAWYQQKPGQPPKLLIYWASTRESGVPDRFSGSGS | (ADI-57359) | |
| | | GTDFTLTISSLQAEDVAVYYCKQSHDRRTFGGGTKV | | |
| | | EIK | | |
| Ab68 | 194 | QVQLVQSGAEVKKPGASVKVSCKASGFNIKDYYMH | SAD10320_P02_A04 | HC amino acid sequence |
| | | WVRQAPGQRLEWMGWIDLENANTIYDAKFQGRVTI | (ADI-57360) | |
| | | TRDTSASTAYMELSSLRSEDTAVYYCARDAYGHAFY | | |
| | | DVWGQGTLVTVSS | | |
| Ab68 | 195 | DIVMTQSPDSLAVSLGERATINCKSSQSLLNARTGKN | SAD10320_P02_A04 | LC amino acid sequence |
| | | YLAWYQQKPGQPPKLLIYWASTRESGVPDRFSGSGS | (ADI-57360) | |
| | | GTDFTLTISSLQAEDVAVYYCKQSLHRRTFGGGTKVE | | |
| | | IK | | |
| Ab69 | 196 | QVQLVQSGAEVKKPGASVKVSCKASGFNIKDYYMH | SAD10318_P01_E03 | HC amino acid sequence |
| | | WVRQAPGQRLEWMGWIDLENANTIYDAKFQGRVTI | (ADI-57272) | |
| | | TRDTSASTAYMELSSLRSEDTAVYYCARDAHGHYFY | | |
| | | DVWGQGTLVTVSS | | |
| Ab69 | 197 | DIVMTQSPDSLAVSLGERATINCKSSQSLLNAHTGKN | SAD10318_P01_E03 | LC amino acid sequence |
| | | HLAWYQQKPGQPPKLLIYWASTRESGVPDRFSGSGS | (ADI-57272) | |
| | | GTDFTLTISSLQAEDVAVYYCKQSYSRRTFGGGTKVE | | |
| | | IK | | |
| Ab70 | 198 | QVQLVQSGAEVKKPGASVKVSCKASGFNIKDYYMH | SAD10320_P02_B04 | HC amino acid sequence |
| | | WVRQAPGQRLERMGWIDLENANTIYDAKFQGRVTIT | (ADI-57273) | |
| | | RDTSASTAYMELSSLRSEDTAVYYCARDAYGHGFYD | | |
| | | VWGQGTLVTVSS | | |
| Ab70 | 199 | DIVMTQSPDSLAVSLGERATINCKSSQSLLNARTGKN | SAD10320_P02_B04 | LC amino acid sequence |
| | | YLAWYQQKPGQPPKLLIYWASTRESGVPDRFSGSGS | (ADI-57273) | |
| | | GTDFTLTISSLQAEDVAVYYCKQSYGHRTFGGGTKV | | |
| | | EIK | | |
| Ab71 | 200 | QVQLVQSGAEVKKPGASVKVSCKASGFNIKDYYMH | SAD10320_P02_C04 | HC amino acid sequence |
| | | WVRQAPGQRLEWMGWIDLENANTIYDAKFQGRVTI | (ADI-48648) | |
| | | TRDTSASTAYMELSSLRSEDTAVYYCARDAYGRYFY | | |
| | | DVWGQGTLVTVSS | | |
| Ab71 | 201 | DIVMTQSPDSLAVSLGERATINCKSSQSLLNARTGKN | SAD10320_P02_C04 | LC amino acid sequence |
| | | YLAWYQQKPGQPPKLLIYWASTRESGVPDRFSGSGS | (ADI-48648) | |
| | | GTDFTLTISSLQAEDVAVYYCKQSHTRRTFGGGTKVE | | |
| | | IK | | |
| Ab72 | 202 | QVQLVQSGAEVKKPGASVKVSCKASGFNIKDYYMH | SAD10320_P02_E04 | HC amino acid sequence |
| | | WVRQAPGQRLEWMGWIDLENANTIYDAKFQGRVTI | (ADI-48649) | |
| | | TRDTSASTAYMELSSLRSEDTAVYYCARDAYHEYFY | | |
| | | DVWGQGTLVTVSS | | |
| Ab72 | 203 | DIVMTQSPDSLAVSLGERATINCKSSQSLLNARTGKN | SAD10320_P02_E04 | LC amino acid sequence |
| | | YLAWYQQKPGQPPKLLIYWASTRESGVPDRFSGSGS | (ADI-48649) | |
| | | GTDFTLTISSLQAEDVAVYYCKQSHVRRTFGGGTKV | | |
| | | EIK | | |
| Ab73 | 204 | QVQLVQSGAEVKKPGASVKVSCKASGFNIKDYYMH | SAD10320_P02_H04 | HC amino acid sequence |
| | | WVRQAPGQRLDWMGWIDLENANTIYDAKFQGRVTI | (ADI-57362) | |
| | | TRDTSASTAYMELSSLRSEDTAVYYCARDAYGHLFY | | |
| | | DVWGQGTLVTVSS | | |
| Ab73 | 205 | DIVMTQSPDSLAVSLGERATINCKSSQSLLNARTGKN | SAD10320_P02_H04 | LC amino acid sequence |
| | | YLAWYQQKPGQPPKLLIYWASTRESGVPDRFSGSGS | (ADI-57362) | |
| | | GTDFTLTISSLQAEDVAVYYCKQSHMRRTFGGGTKV | | |
| | | EIK | | |
| Ab74 | 206 | QVQLVQSGAEVKKPGASVKVSCKASGFNIKDYYMH | SAD10320_P02_A05 | HC amino acid sequence |
| | | WVRQAPGQRLEWMGWIDLENANTIYDAKFQGRVTI | (ADI-57363) | |
| | | TRDTSASTAYMELSSLRSEDTAVYYCARDAYGHMFY | | |
| | | DVWGQGTLVTVS | | |
| Ab74 | 207 | DIVMTQSPDSLAVSLGERATINCKSSQSLLNARPGKN | SAD10320_P02_A05 | LC amino acid sequence |
| | | YLAWYQQKPGQPPKLLIYWASTRESGVPDRFSGSGS | (ADI-57363) | |
| | | GTDFTLTISSLQAEDVAVYYCKQSYHMRTFGGGTKV | | |
| | | EIK | | |
| Ab75 | 208 | QVQLVQSGAEVKKPGASVKVSCKASGFNIKDYYMH | SAD10320_P02_B05 | HC amino acid sequence |
| | | WVRQAPGQRLEWMGWIDLENANTIYDAKFQGRVTI | (ADI-57364) | |
| | | TRDTSASTAYMELSSLRSEDTAVYYCARDAYGHNFY | | |
| | | DVWGQGTLVTVSS | | |
| Ab75 | 209 | DIVMTQSPDSLAVSLGERATINCKSSQSLLNARTGKN | SAD10320_P02_B05 | LC amino acid sequence |
| | | YLAWYQQKPGQPPKLLIYWASTRESGVPDRFSGSGS | (ADI-57364) | |
| | | GTDFTLTISSLQAEDVAVYYCKQSYTHRTFGGGTKV | | |
| | | EIK | | |
| Ab76 | 210 | QVQLVQSGAEVKKPGASVKVSCKASGSNIKDYYMH | SAD10320_P02_C05 | HC amino acid sequence |
| | | WVRQAPGQRLEWMGWIDLENANTIYDAKFQGRVTI | (ADI-57365) | |
| | | TRDTSASTAYMELSSLRSEDTAVYYCARDAYGHSFY | | |
| | | DVWGQGTLVTVSS | | |
| Ab76 | 211 | DIVMTQSPDSLAVSLGERATINCKSSQSLLNARTGKN | SAD10320_P02_C05 | LC amino acid sequence |
| | | YLAWYQQKPGQPPKLLIYWASTRESGVPDRFSGSGS | (ADI-57365) | |
| | | GTDFTLTISSLQAEDVAVYYCKQSYHGRTFGGGTKV | | |
| | | EIK | | |
| Ab77 | 212 | QVQLVQSGAEVKKPGASVKVSCKASGFNIKDYYMH | SAD10320_P02_D05 | HC amino acid sequence |
| | | WVRQAPGQRLEWMGWIDLENANTIYDAKFQGRVTI | (ADI-48650) | |
| | | TRDTSASTAYMELSSLRSEDTAVYYCARDATHRYFY | | |
| | | DVWGQGTLVTVSS | | |
| Ab77 | 213 | DIVMTQSPDSLAVSLGERATINCKSSQSLLNARTGKN | SAD10320_P02_D05 | LC amino acid sequence |
| | | YLAWYQQKPGQPPKLLIYWASTRESGVPDRFSGSGS | (ADI-48650) | |
| | | GTDFTLTISSLQAEDVAVYYCKQSHTRRTFGGGTKVE | | |
| | | I | | |
| Ab78 | 214 | QVQLVQSGAEVKKPGASVKVSCKASGFNIKDYYMH | SAD10320_P02_E05 | HC amino acid sequence |
| | | WVRQAPGQRLEWMGWIDLENANTIYDAKFQGRVTI | (ADI-57366) | |
| | | TRDTSASTAYMELSSLRSEDTAVYYCARDMHGRYFY | | |
| | | DVWGQGTLVTVSS | | |
| Ab78 | 215 | DIVMTQSPDSLAVSLGERATINCKSSQSLLNARTGKN | SAD10320_P02_E05 | LC amino acid sequence |
| | | YLAWYQQKPGQPPKLLIYWASTRESGVPDRFSGSGS | (ADI-57366) | |
| | | GTDFTLTISSLQAEDVAVYYCKQSEHRRTFGGGTKVE | | |
| | | IK | | |
| Ab79 | 216 | QVQLVQSGAEVKKPGASVKVSCKASGFNIKDYYMH | SAD10320_P02_F05 | HC amino acid sequence |
| | | WVRQAPGQRLEWMGWIDLENANTIYDAKFQGRVTI | (ADI-48651) | |
| | | TRDTSASTAYMELSSLRSEDTAVYYCARDAYGRYHY | | |
| | | DVWGQGTLVTVSS | | |
| Ab79 | 217 | DIVMTQSPDSLAVSLGERATINCKSSQSLLNARTGKN | SAD10320_P02_F05 | LC amino acid sequence |
| | | YLAWYQQKPGQPPKLLIYWASTRESGVPDRFSGSGS | (ADI-48651) | |
| | | GTDFTLTISSLQAEDVAVYYCKQSYRHRTFGGGTKV | | |
| | | EIK | | |
| Ab80 | 218 | QVQLVQSGAEVKKPGASVKVSCKASGFNIKDYYMH | SAD10318_P01_F03 | HC amino acid sequence |
| | | WVRQAPGQRLEWMGWIDLENANTIYDAKFQGRVTI | (ADI-48589) | |
| | | TRDTSASTAYMELSSLRSEDTAVYYCARDAHGRYFY | | |
| | | DHWGQGTLVTVSS | | |
| Ab80 | 219 | DIVMTQSPDSLAVSLGERATINCKSSQSLLNAHTGHN | SAD10318_P01_F03 | LC amino acid sequence |
| | | YLAWYQQKPGQPPKLLIYWASTRESGVPDRFSGSGS | (ADI-48589) | |
| | | GTDFTLTISSLQAEDVAVYYCKQSYSHRTFGGGTKVE | | |
| | | IK | | |
| Ab81 | 220 | QVQLVQSGAEVKKPGASVKVSCKASGFNIKDYYMH | SAD10320_P02_H05 | HC amino acid sequence |
| | | WVRQAPGQRLEWMGWIDLENANTIYDAKFQGRVTI | (ADI-48652) | |
| | | TRDTSASTAYMELSSLRSEDTAVYYCARDAHHRYFY | | |
| | | DVWGQGTLVTVSS | | |
| Ab81 | 221 | DIVMTQSPDSLAVSLGERATINCKSSQSLLNARTGKN | SAD10320_P02_H05 | LC amino acid sequence |
| | | YLAWYQQKPGQPPKLLIYWASTRESGVPDRFSGSGS | (ADI-48652) | |
| | | GTDFTLTISSLQAEDVAVYYCKQSHSRRTFGGGTKVE | | |
| | | IK | | |
| Ab82 | 222 | QVQLVQSGAEVKKPGASVKVSCKASGFNIKDYYMH | SAD10320_P02_A06 | HC amino acid sequence |
| | | WVRQAPGQRLPWMGWIDLENANTIYDAKFQGRVTI | (ADI-57367) | |
| | | TRDTSASTAYMELSSLRSEDTAVYYCARDAHERYFY | | |
| | | DVWGQGTLVTVSS | | |
| Ab82 | 223 | DIVMTQSPDSLAVSLGERATINCKSSQSLLNARTGKN | SAD10320_P02_A06 | LC amino acid sequence |
| | | YLAWYQQKPGQPPKLLIYWASTRESGVPDRFSGSGS | (ADI-57367) | |
| | | GTDFTLTISSLQAEDVAVYYCKQSHLRRTFGGGTKVE | | |
| | | IK | | |
| Ab83 | 224 | QVQLVQSGAEVKKPGASVKVSCKASGFNIKDYYMH | SAD10320_P02_B06 | HC amino acid sequence |
| | | WVRQAPGQRLEWMGWIDLENANTIYDAKFQGRVTI | (ADI-48653) | |
| | | TRDTSASTAYMELSSLRSEDTAVYYCARDAYGHWF | | |
| | | YDVWGQGTLVTVSS | | |
| Ab83 | 225 | DIVMTQSPDSLAVSLGERATINCKSSQSLLNARTGKN | SAD10320_P02_B06 | LC amino acid sequence |
| | | YLAWYQQKPGQPPKLLIYWASTRESGVPDRFSGSGS | (ADI-48653) | |
| | | GTDFTLTISSLQAEDVAVYYCKQSYHHRTFGGGTKV | | |
| | | EIK | | |
| Ab84 | 226 | QVQLVQSGAEVKKPGASVKVSCKASGFNIKDYYMH | SAD10320_P02_C06 | HC amino acid sequence |
| | | WVRQAPGQRLEWMGWIDLENANTIYDAKFQGRVTI | (ADI-48654) | |
| | | TRDTSASTAYMELSSLRSEDTAVYYCARDAYGRYFY | | |
| | | DVWGQGTLVTVSS | | |
| Ab84 | 227 | DIVMTQSPDSLAVSLGERATINCKSSQSLLNARTGKN | SAD10320_P02_C06 | LC amino acid sequence |
| | | YLAWYQQKPGQPPKLLIYWASTRESGVPDRFSGSGS | (ADI-48654) | |
| | | GTDFTLTISSLQAEDVAVYYCKQSGHRRTFGGGTKV | | |
| | | EIK | | |
| Ab85 | 228 | QVQLVQSGAEVKKPGASVKVSCKASGFNIKDYYMH | SAD10320_P02_D06 | HC amino acid sequence |
| | | WVRQAPGQRPAWMGWIDLENANTIYDAKFQGRVTI | (ADI-57368) | |
| | | TRDTSASTAYMELSSLRSEDTAVYYCARDAYGHGFY | | |
| | | DVWGQGTLVTVSS | | |
| Ab85 | 229 | DIVMTQSPDSLAVSLGERATINCKSSQSLLNARTGKN | SAD10320_P02_D06 | LC amino acid sequence |
| | | YLAWYQQKPGQPPKLLIYWASTRESGVPDRFSGSGS | (ADI-57368) | |
| | | GTDFTLTISSLQAEDVAVYYCKQSYGHRTFGGGTKV | | |
| | | EIK | | |
| Ab86 | 230 | QVQLVQSEAEVKKPGASVKVSCKASGFNIKDYYMH | SAD10320_P02_E06 | HC amino acid sequence |
| | | WVRQAPGQRLQWMGWIDLENANTIYDAKFQGRVTI | (ADI-57369) | |
| | | TRDTSASTAYMELSSLRSEDTAVYYCARDAYGHGFY | | |
| | | DVWGQGTLVTVSS | | |
| Ab86 | 231 | DIVMTQSPDSLAVSLGERATINCKSSQSLLNARPGKN | SAD10320_P02_E06 | LC amino acid sequence |
| | | YLAWYQQKPGQPPKLLIYWASTRESGVPDRFSGSGS | (ADI-57369) | |
| | | GTDFTLTISSLQAEDVAVYYCKQSYSRRTFGGGTKVE | | |
| | | IK | | |
| Ab87 | 232 | QVQLVQSGAEVKKPGASVKVSCKASGFNIKDYYMH | SAD10320_P02_F06 | HC amino acid sequence |
| | | WVRQAPGQRLAWMGWIDLENANTIYDAKFQGRVTI | (ADI-57370) | |
| | | TRDTSASTAYMELSSLRSEDTAVYYCARDAYGRFHY | | |
| | | DVWGQGTLVTVSS | | |
| Ab87 | 233 | DIVMTQSPDSLAVSLGERATINCKSSQSLLNARPGKN | SAD10320_P02_F06 | LC amino acid sequence |
| | | YLAWYQQKPGQPPKLLIYWASTRESGVPDRFSGSGS | (ADI-57370) | |
| | | GTDFTLTISSLQAEDVAVYYCKQSYSRRTFGGGTKVE | | |
| | | IK | | |
| Ab88 | 234 | QVQLVQSGAEVKKPGASVKVSCKASGFNIKDYYMH | SAD10320_P02_G06 | HC amino acid sequence |
| | | WVRQAPGQRLDWMGWIDLENANTIYDAKFQGRVTI | (ADI-57371) | |
| | | TRDTSASTAYMELSSLRSEDTAVYYCARDAYGRHFY | | |
| | | DVWGQGTLVTVSS | | |
| Ab88 | 235 | DIVMTQSPDSLAVSLGERATINCKSSQSLLNARTRTN | SAD10320_P02_G06 | LC amino acid sequence |
| | | YLAWYQQKPGQPPKLLIYWASTRESGVPDRFSGSGS | (ADI-57371) | |
| | | GTDFTLTISSLQAEDVAVYYCKQSYSRRTFGGGTKVE | | |
| | | IK | | |
| Ab89 | 236 | QVQLVQSGAEVKKPGASVKVSCKASGFNIKDYYMH | SAD10320_P02_H06 | HC amino acid sequence |
| | | WVRQAPGQRLEWMGWIDLENANTIYDAKFQGRVTI | (ADI-57372) | |
| | | TRDTSASTAYMELSSLRSEDTAVYYCARDAYGRNHY | | |
| | | DVWGQGTLVTVSS | | |
| Ab89 | 237 | DIVMTQSPDSLAVSLGERATINCKSSQSLLNARTGKS | SAD10320_P02_H06 | LC amino acid sequence |
| | | YLAWYQQKPGQPPKLLIYWASTRESGVPDRFSGSGS | (ADI-57372) | |
| | | GTDFTLTISSLQAEDVAVYYCKQSYVHRTFGGGTKV | | |
| | | EIK | | |
| Ab90 | 238 | QVQLVQSGAEVKKPGASVKVSCKASGFNIKDYYMH | SAD10320_P03_B07 | HC amino acid sequence |
| | | WVRQAPGQRLAWMGWIDLENANTIYDAKFQGRVTI | (ADI-57373) | |
| | | TRDTSASTAYMELSSLRSEDTAVYYCARDAYGHDFY | | |
| | | DVWGQGTLVTVSS | | |
| Ab90 | 239 | DIVMTQSPDSLAVSLGERATINCKSSQSLLNARTGKN | SAD10320_P03_B07 | LC amino acid sequence |
| | | YLAWYQQKPGQPPKLLIYWASTRESGVPDRFSGSGS | (ADI-57373) | |
| | | GTDFTLTISSLQAEDVAVYYCKQSYSRRTFGGGTKVE | | |
| | | IK | | |
| Ab91 | 240 | QVQLVQSGAEVKKPGASVKVSCKASGFNIKDYYMH | SAD10318_P01_G03 | HC amino acid sequence |
| | | WVRQAPGQRLEWMGWIDLENANTIYDAKFQGRVTI | (ADI-48590) | |
| | | TRDTSASTAYMELSSLRSEDTAVYYCAHDAYGHYFY | | |
| | | DVWGQGTLVTVSS | | |
| Ab91 | 241 | DIVMTQSPDSLAVSLGERATINCKSSQSLLNAHTGHN | SAD10318_P01_G03 | LC amino acid sequence |
| | | YLAWYQQKPGQPPKLLIYWASTRESGVPDRFSGSGS | (ADI-48590) | |
| | | GTDFTLTISSLQAEDVAVYYCKQSYHHRTFGGGTKV | | |
| | | EIK | | |
| Ab92 | 242 | QVQLVQSGAEVKKPGASVKVSCKASGFNIKDYYMH | SAD10320_P03_E07 | HC amino acid sequence |
| | | WVRQAPGQRLEWMGWIDLENANTIYDAKFQGRVTI | (ADI-57374) | |
| | | TRDTSASTAYMELSSLRSEDTAVYYCARDAVHRYFY | | |
| | | DVWGQGTLVTVSS | | |
| Ab92 | 243 | DIVMTQSPDSLAVSLGERATINCKSSQSLLNARTGKN | SAD10320_P03_E07 | LC amino acid sequence |
| | | YLAWYQQKPGQPPKLLIYWASTRESGVPDRFSGSGS | (ADI-57374) | |
| | | GTDFTLTISSLQAEDVAVYYCKQSYHPRTFGGGTKVE | | |
| | | IK | | |
| Ab93 | 244 | QVQLVQSGAEVKKPGASVKVSCKASGFNIKDYYMH | SAD10320_P03_H07 | HC amino acid sequence |
| | | WVRQAPGQRLEWMGWIDLENANTIYDAKFQGRVTI | (ADI-57375) | |
| | | TRDTSASTAYMELSSLRSEDTAVYYCARDAYGHTFY | | |
| | | DVWGQGTLVTVSS | | |
| Ab93 | 245 | DIVMTQSPDSLAVSLGERATINCKSSQSLLNARTGKN | SAD10320_P03_H07 | LC amino acid sequence |
| | | YLAWYQQKPGQPPKLLIYWASTRESGVPDRFSGSGS | (ADI-57375) | |
| | | GTDFTLTISSLQAEDVAVYYCKQSYSHVTFGGGTKV | | |
| | | EIK | | |
| Ab94 | 246 | QVQLVQSGAEVKKPGASVKVSCEASGFNIKDYYMH | SAD10320_P03_C08 | HC amino acid sequence |
| | | WVRQAPGQTLAWMGWIDLENANTIYDAKFQGRVTI | (ADI-57376) | |
| | | TRDTSASTAYMELSSLRSEDTAVYYCARDAYGHVFY | | |
| | | DVWGQGTLVTVSS | | |
| Ab94 | 247 | DIVMTQSPDSLAVSLGERATINCKSSQSLLNARTGKN | SAD10320_P03_C08 | LC amino acid sequence |
| | | YLAWYQQKPGQPPKLLIYWASTRESGVPDRFSGSGS | (ADI-57376) | |
| | | GTDFTLTISSLQAEDVAVYYCKQSYLHRTFGGGTKV | | |
| | | EIK | | |
| Ab95 | 248 | QVQLVQSGAEVKKPGASVKVSCKASGFNIKDYYMH | SAD10320_P03_D08 | HC amino acid sequence |
| | | WVRQAPGQRLEWMGWIDLENANTIYDAKFQGRVTI | (ADI-57377) | |
| | | TRDTSASTAYMELSSLRSEDTAVYYCARDAYGHQFY | | |
| | | DVWGQGTLVTVSS | | |
| Ab95 | 249 | DIVMTQSPDSLAVSLGERATINCKSSQSLLNARTGKN | SAD10320_P03_D08 | LC amino acid sequence |
| | | YLAWYQQKPGQPPKLLIYWASTRESGVPDRFSGSGS | (ADI-57377) | |
| | | GTDFTLTISSLQAEDVAVYYCKQSYHTRTFGGGTKV | | |
| | | EIK | | |
| Ab96 | 250 | QVQLVQSGAEVKKPGASVKVSCKASGFNIKDYYMH | SAD10320_P03_F08 | HC amino acid sequence |
| | | WVRQAPGQRLEWMGWIDLENANTIYDAKFQGRVTI | (ADI-57378) | |
| | | TRDTSASTAYMELSSLRSEDTAVYYCARDAYGHDFY | | |
| | | DVWGQGTLVTVSS | | |
| Ab96 | 251 | DIVMTQSPDSLAVSLGERATINCKSSQSLLNARPGKN | SAD10320_P03_F08 | LC amino acid sequence |
| | | YLAWYQQKPGQPPKLLIYWASTRESGVPDRFSGSGS | (ADI-57378) | |
| | | GTDFTLTISSLQAEDVAVYYCKQSYSRRTFGGGTKVE | | |
| | | IK | | |
| Ab97 | 252 | QVQLVQSGAEVKKPGASVKVSCKASGFNIKDYYMH | SAD10320_P03_H08 | HC amino acid sequence |
| | | WVRQAPGQRLEWMGWIDLENANTIYDAKFQGRVTI | (ADI-57379) | |
| | | TRDTSASTAYMELSSLRSEDTAVYYCARDAYGHVFY | | |
| | | DVWGQGTLVTVSS | | |
| Ab97 | 253 | DIVMTQSPDSLAVSLGERATINCKSSQSLLNASTAKN | SAD10320_P03_H08 | LC amino acid sequence |
| | | YLAWYQQKPGQPPKLLIYWASTRESGVPDRFSGSGS | (ADI-57379) | |
| | | GTDFTLTISSLQAEDVAVYYCKQSYRHRTFGGGTKV | | |
| | | EIK | | |
| Ab98 | 254 | QVQLVQSGAEVKKPGASVKVSCKASGFNIKDYYMH | SAD10320_P03_A09 | HC amino acid sequence |
| | | WVRQAPGQRLEWMGWIDLENANTIYDAKFQGRVTI | (ADI-57380) | |
| | | TRDTSASTAYMELSSLRSEDTAVYYCARDAYGHVFY | | |
| | | DVWGQGTLVTVSS | | |
| Ab98 | 255 | DIVMTQSPDSLAVSLGERATINCKSSQSLLNARTGKN | SAD10320_P03_A09 | LC amino acid sequence |
| | | YLAWYQQKPGQPPKLLIYWASTRESGVPDRFSGSGS | (ADI-57380) | |
| | | GTDFTLTISSLQAEDVAVYYCKQSSHRRTFGGGTKVE | | |
| | | IK | | |
| Ab99 | 256 | QVQLVQSGAEVKKPGASVKVSCEASGFNIKDYYMH | SAD10320_P03_C09 | HC amino acid sequence |
| | | WVRQAPGQRLEWMGWIDLENANTIYDAKFQGRVTI | (ADI-57381) | |
| | | TRDTSASTAYMELSSLRSEDTAVYYCARDAYGHVFY | | |
| | | DVWGQGTLVTVSS | | |
| Ab99 | 257 | DIVMTQSPDSLAVSLGERATINCKSSQSLLNARTGKN | SAD10320_P03_C09 | LC amino acid sequence |
| | | YLAWYQQKPGQPPKLLIYWASTRESGVPDRFSGSGS | (ADI-57381) | |
| | | GTDFTLTISSLQAEDVAVYYCKQSYLHRTFGGGTKV | | |
| | | EIK | | |
| Ab100 | 258 | QVQLVQSGAEVKKPGASVKVSCKASGFNIKDYYMH | SAD10320_P03_D09 | HC amino acid sequence |
| | | WVRQAPGQRLEWMGWIDLENANTIYDAKFQGRVTI | (ADI-48655) | |
| | | TRDTSASTAYMELSSLRSEDTAVYYCARDAYGHDFY | | |
| | | DVWGQGTLVTVSS | | |
| Ab100 | 259 | DIVMTQSPDSLAVSLGERATINCKSSQSLLNARTGKN | SAD10320_P03_D09 | LC amino acid sequence |
| | | YLAWYQQKPGQPPKLLIYWASTRESGVPDRFSGSGS | (ADI-48655) | |
| | | GTDFTLTISSLQAEDVAVYYCKQSWHRRTFGGGTKV | | |
| | | EIK | | |
| Ab101 | 260 | QVQLVQSGAEVKKPGASVKVSCKASGFNIKDYYMH | SAD10320_P03_F09 | HC amino acid sequence |
| | | WVRQAPGQRLEWMGWIDLENANTIYDAKFQGRVTI | (ADI-48656) | |
| | | TRDTSASTAYMELSSLRSEDTAVYYCARDAYGHDFY | | |
| | | DVWGQGTLVTVSS | | |
| Ab101 | 261 | DIVMTQSPDSLAVSLGERATINCKSSQSLLNARTGKN | SAD10320_P03_F09 | LC amino acid sequence |
| | | YLAWYQQKPGQPPKLLIYWASTRESGVPDRFSGSGS | (ADI-48656) | |
| | | GTDFTLTISSLQAEDVAVYYCKQSYHRRTFGGGTKV | | |
| | | EIK | | |
| Ab102 | 262 | QVQLVQSGAEVKKPGASVKVSCKASGFNIKDYYMH | SAD10318_P01_H03 | HC amino acid sequence |
| | | WVRQAPGQRLEWMGWIDLENANTIYDAKFQGRVTI | (ADI-48591) | |
| | | TRDTSASTAYMELSSLRSEDTAVYYCAHDAYGHYFY | | |
| | | DVWGQGTLVTVSS | | |
| Ab102 | 263 | DIVMTQSPDSLAVSLGERATINCKSSQSLLNARTGHN | SAD10318_P01_H03 | LC amino acid sequence |
| | | YLAWYQQKPGQPPKLLIYWASTRESGVPDRFSGRGS | (ADI-48591) | |
| | | GTDFTLTISSLQAEDVAVYYCKQSYHHRTFGGGTKV | | |
| | | EIK | | |
| Ab103 | 264 | QVQLVQSGAEVKKPGASVKVSCKASGFNIKDYYMH | SAD10320_P04_A10 | HC amino acid sequence |
| | | WVRQAPGQRLDWMGWIDLENANTIYDAKFQGRVTI | (ADI-57382) | |
| | | TRDTSASTAYMELSSLRSEDTAVYYCARDAYGHDFY | | |
| | | DVWGQGTLVTVSS | | |
| Ab103 | 265 | DIVMTQSPDSLAVSLGERATINCKSSQSLLNARTGKN | SAD10320_P04_A10 | LC amino acid sequence |
| | | YLAWYQQKPGQPPKLLIYWASTRESGVPDRFSGSGS | (ADI-57382) | |
| | | GTDFTLTISSLQAEDVAVYYCKQSYSRRTFGGGTKVE | | |
| | | IK | | |
| Ab104 | 266 | QVQLVQSGAEVKKPGASVKVSCKASGFNIKDYYMH | SAD10320_P04_C10 | HC amino acid sequence |
| | | WVRQAPGQRLEWMGWIDLENANTIYDAKFQGRVTI | (ADI-57383) | |
| | | TRDTSASTAYMELSSLRSEDTAVYYCARDAYGHAFY | | |
| | | DVWGQGTLVTVSS | | |
| Ab104 | 267 | DIVMTQSPDSLAVSLGERATINCKSSQSLLNARTGKN | SAD10320_P04_C10 | LC amino acid sequence |
| | | YLAWYQQKPGQPPKLLIYWASTRESGVPDRFSGSGS | (ADI-57383) | |
| | | GTDFTLTISSLQAEDVAVYYCKQSYHQRTFGGGTKV | | |
| | | EIK | | |
| Ab105 | 268 | QVQLVQSGAEVKKPGASVKVSCEASGFNIKDYYMH | SAD10320_P04_D10 | HC amino acid sequence |
| | | WVRQAPGQRPEWMGWIDLENANTIYDAKFQGRVTI | (ADI-57384) | |
| | | TRDTSASTAYMELSSLRSEDTAVYYCARDAYGHVFY | | |
| | | DVWGQGTLVTVSS | | |
| Ab105 | 269 | DIVMTQSPDSLAVSLGERATINCKSSQSLLNARTGKN | SAD10320_P04_D10 | LC amino acid sequence |
| | | YLAWYQQKPGQPPKLLIYWASTRESGVPDRFSGSGS | (ADI-57384) | |
| | | GTDFTLTISSLQAEDVAVYYCKQSYLHRTFGGGTKV | | |
| | | EIK | | |
| Ab106 | 270 | QVQLVQSGAEVKKPGASVKVSCKASGFNIKDYYMH | SAD10320_P04_E10 | HC amino acid sequence |
| | | WVRQAPGQRPEWMGWIDLENANTIYDAKFQGRVTI | (ADI-48657) | |
| | | TRDTSASTAYMELSSLRSEDTAVYYCARDAYGHDFY | | |
| | | DVWGQGTLVTVSS | | |
| Ab106 | 271 | DIVMTQSPDSLAVSLGERATINCKSSQSLLNARTGKN | SAD10320_P04_E10 | LC amino acid sequence |
| | | YLAWYQQKPGQPPKLLIYWASTRESGVPDRFSGSGS | (ADI-48657) | |
| | | GTDFTLTISSLQAEDVAVYYCKQSYSRRTFGGGTKVE | | |
| | | IK | | |
| Ab107 | 272 | QVQLVQSGAEVKKPGASVKVSCKASGFNIKDYYMH | SAD10320_P04_F10 | HC amino acid sequence |
| | | WVRQAPGQTLDWMGWIDLENANTIYDAKFQGRVTI | (ADI-57385) | |
| | | TRDTSASTAYMELSSLRSEDTAVYYCARDAYGRNHY | | |
| | | DVWGQGTLVTVSS | | |
| Ab107 | 273 | DIVMTQSPDSLAVSLGERATINCKSSQSLLNARPGKN | SAD10320_P04_F10 | LC amino acid sequence |
| | | YLAWYQQKPGQPPKLLIYWASTRESGVPDRFSGSGS | (ADI-57385) | |
| | | GTDFTLTISSLQAEDVAVYYCKQSYLHRTFGGGTKV | | |
| | | EIK | | |
| Ab108 | 274 | QVQLVQSGAEVKKPGASVKVSCKASGFNIKDYYMH | SAD10320_P04_G10 | HC amino acid sequence |
| | | WVRQAPGQRLEWMGWIDLENANTIYDAKFQGRVTI | (ADI-48658) | |
| | | TRDTSASTAYMELSSLRSEDTAVYYCARDAYGHDFY | | |
| | | DVWGQGTLVTVSS | | |
| Ab108 | 275 | DIVMTQSPDSLAVSLGERATINCKSSQSLLNARTGKN | SAD10320_P04_G10 | LC amino acid sequence |
| | | YLAWYQQKPGQPPKLLIYWASTRESGVPDRFSGSGS | (ADI-48658) | |
| | | GTDFTLTISSLQAEDVAVYYCKQSYSRRTFGGGTKVE | | |
| | | IK | | |
| Ab109 | 276 | QVQLVQSGAEVKKPGASVKVSCKASGFNIKDYYMH | SAD10320_P04_A11 | HC amino acid sequence |
| | | WVRQAPGQRLQWMGWIDLENANTIYDAKFQGRVTI | (ADI-57386) | |
| | | TRDTSASTAYMELSSLRSEDTAVYYCARDARHRYFY | | |
| | | DVWGQGTLVTVSS | | |
| Ab109 | 277 | DIVMTQSPDSLAVSLGERATINCKSSQSLLNARTGKN | SAD10320_P04_A11 | LC amino acid sequence |
| | | YLAWYQQKPGQPPKLLIYWASTRESGVPDRFSGSGS | (ADI-57386) | |
| | | GTDFTLTISSLQAEDVAVYYCKQSYSHGTFGGGTKV | | |
| | | EIK | | |
| Ab110 | 278 | QVQLVQSGAEVKKPGASVKVSCKASGFNIKDYYMH | SAD10320_P04_D11 | HC amino acid sequence |
| | | WVRQAPGQRLQWMGWIDLENANTIYDAKFQGRVTI | (ADI-57387) | |
| | | TRDTSASTAYMELSSLRSEDTAVYYCARDAYGHVFY | | |
| | | DVWGQGTLVTVSS | | |
| Ab110 | 279 | DIVMTQSPDSLAVSLGERATINCKSSQSLLNARTGKN | SAD10320_P04_D11 | LC amino acid sequence |
| | | YLAWYQQKPGQPPKLLIYWASTRESGVPDRFSGSGS | (ADI-57387) | |
| | | GTDFTLTISSLQAEDVAVYYCKQSYHHRTFGGGTKV | | |
| | | EIK | | |
| Ab111 | 280 | QVQLVQSGAEVKKPGASVKVSCKASGFNIKDYYMH | SAD10320_P04_E11 | HC amino acid sequence |
| | | WVRQAPGQRLEWMGWIDLENANTIYDAKFQGRVTI | (ADI-57388) | |
| | | TRDTSASTAYMELSSLRSEDTAVYYCARDAYGHDFY | | |
| | | DVWGQGTLVTVSS | | |
| Ab111 | 281 | DIVMTQSPDSLAVSLGERATINCKSSQSLLNARTGKN | SAD10320_P04_E11 | LC amino acid sequence |
| | | YLAWYQQKPGQPPKLLIYWASTRESGVPDRFSGSGS | (ADI-57388) | |
| | | GTDFTLTISSLQAEDVAVYYCKQSYGHRTFGGGTKV | | |
| | | EIK | | |
| Ab112 | 282 | QVQLVQSGAEVKKPGASVKVSCKASGFNIKDYYMH | SAD10320_P04_F11 | HC amino acid sequence |
| | | WVRQAPGQRLEWMGWIDLENANTIYDAKFQGRVTI | (ADI-57389) | |
| | | TRDTSASTAYMELSSLRSEDTAVYYCARDAYGHEFY | | |
| | | DVWGQGTLVTVSS | | |
| Ab112 | 283 | DIVMTQSPDSLAVSLGERATINCKSSQSLLNARTGKN | SAD10320_P04_F11 | LC amino acid sequence |
| | | YLAWYQQKPGQPPKLLIYWASTRESGVPDRFSGSGS | (ADI-57389) | |
| | | GTDFTLTISSLQAEDVAVYYCKQGHSRRTFGGGTKV | | |
| | | EIK | | |
| Ab113 | 284 | QVQLVQSGAEVKKPGASVKVSCKASGFNIKDYYMH | SAD10318_P01_C01 | HC amino acid sequence |
| | | WVRQAPGQRLEWMGWIDLENANTIYDAKFQGRVTI | (ADI-48575) | |
| | | TRDTSASTAYMELSSLRSEDTAVYYCARDAYHRYHY | | |
| | | DVWGQGTLVTVSS | | |
| Ab113 | 285 | DIVMTQSPDSLAVSLGERATINCKSSQSLLNAHTHKN | SAD10318_P01_C01 | LC amino acid sequence |
| | | YLAWYQQKPGQPPKLLIYWASTRESGVPDRFSGSGS | (ADI-48575) | |
| | | GTDFTLTISSLQAEDVAVYYCKQSHSHRTFGGGTKVE | | |
| | | IK | | |
| Ab114 | 286 | QVQLVQSGAEVEKPGASVKVSCKASGFNIKDYYMH | SAD10318_P02_B04 | HC amino acid sequence |
| | | WVRQAPGQRLEWMGWIDLENANTIYDAKFQGRVTI | (ADI-57273) | |
| | | TRDTSASTAYMELSSLRSEDTAVYYCARDAHGRYHY | | |
| | | DVWGQGTLVTVSS | | |
| Ab114 | 287 | DIVMTQSPDSLAVSLGERATINCKSSQSLLNAHTGHN | SAD10318_P02_B04 | LC amino acid sequence |
| | | YLAWYQQKPGQPPKLLIYWASTRESGVPDRFSGSGS | (ADI-57273) | |
| | | GTDFTLTISSLQAEDVAVYYCKQSYSRRTFGGGTKVE | | |
| | | IK | | |
| Ab115 | 288 | QVQLVQSGAEVKKPGASVKVSCKASGFNIKDYYMH | SAD10320_P04_G11 | HC amino acid sequence |
| | | WVRQAPGQRLEWMGWIDLENANTIYDAKFQGRVTI | (ADI-57390) | |
| | | TRDTSASTAYMELSSLRSEDTAVYYCARDAYRHEFY | | |
| | | DVWGQGTLVTVSS | | |
| Ab115 | 289 | DIVMTQSPDSLAVSLGERATINCKSSQSLLNARTGKN | SAD10320_P04_G11 | LC amino acid sequence |
| | | YLAWYQQKPGQPPKLLIYWASTRESGVPDRFSGSGS | (ADI-57390) | |
| | | GTDFTLTISSLQAEDVAVYYCKQSYYHRTFGGGTKV | | |
| | | EIK | | |
| Ab116 | 290 | QVQLVQSGAEVKKPGASVKVSCKASGFNIKDYYMH | SAD10320_P04_H11 | HC amino acid sequence |
| | | WVRQAPGQRLEWMGWIDLENANTIYDAKFQGRVTI | (ADI-48662) | |
| | | TRDTSASTAYMELSSLRSEDTAVYYCARDAYGHVFY | | |
| | | DVWGQGTLVTVSS | | |
| Ab116 | 291 | DIVMTQSPDSLAVSLGERATINCKSSQSLLNARTGKN | SAD10320_P04_H11 | LC amino acid sequence |
| | | YLAWYQQKPGQPPKLLIYWASTRESGVPDRFSGSGS | (ADI-48662) | |
| | | GTDFTLTISSLQAEDVAVYYCKQSYQHRTFGGGTKV | | |
| | | EIK | | |
| Ab117 | 292 | QVQLVQSGAEVKKPGASVKVSCKASGFNIKDYYMH | SAD10320_P04_A12 | HC amino acid sequence |
| | | WVRQAPGQRLEWMGWIDLENANTIYDAKFQGRVTI | (ADI-57391) | |
| | | TRDTSASTAYMELSSLRSEDTAVYYCARDAYGHVFY | | |
| | | DVWGQGTLVTVSS | | |
| Ab117 | 293 | DIVMTQSPDSLAVSLGERATINCKSSQSLLNARTGKN | SAD10320_P04_A12 | LC amino acid sequence |
| | | YLAWYQQKPGQPPKLLIYWASTRESGVPDRFSGSGS | (ADI-57391) | |
| | | GTDFTLTISSLQAEDVAVYYCKQSYHHRTFGGGTKV | | |
| | | EIK | | |
| Ab118 | 294 | QVQLVQSGAEVKKPGASVKVSCKASGFNIKDYYMH | SAD10320_P04_D12 | HC amino acid sequence |
| | | WVRQAPGQRLEWMGWIDLENANTIYDAKFQGRVTI | (ADI-57392) | |
| | | TRDTSASTAYMELSSLRSEDTAVYYCARDAYGHDFY | | |
| | | DVWGQGTLVTVSS | | |
| Ab118 | 295 | DIVMTQSPDSLAVSLGERATINCKSSQSLLNARTGKN | SAD10320_P04_D12 | LC amino acid sequence |
| | | YLAWYQQKPGQPPKLLIYWASTRESGVPDRFSGSGS | (ADI-57392) | |
| | | GTDFTLTISSLQAEDVAVYYCKQSYSHRTFGGGTKVE | | |
| | | IK | | |
| Ab119 | 296 | QVQLVQSGAEVKKPGASVKVSCKASGFNIKDYYMH | SAD10320_P04_E12 | HC amino acid sequence |
| | | WVRQAPGQRLEWMGWIDLENANTIYDAKFQGRVTI | (ADI-57393) | |
| | | TRDTSASTAYMELSSLRSEDTAVYYCARDAYGHTFY | | |
| | | DVWGQGTLVTVSS | | |
| Ab119 | 297 | DIVMTQSPDSLAVSLGERATINCKSSQSLLNARTGKN | SAD10320_P04_E12 | LC amino acid sequence |
| | | YLAWYQQKPGQPPKLLIYWASTRESGVPDRFSGSGS | (ADI-57393) | |
| | | GTDFTLTISSLQAEDVAVYYCKQSYHVRTFGGGTKV | | |
| | | EIK | | |
| Ab120 | 298 | QVQLVQSGAEVKKPGASVKVSCKASGFNIKDYYMH | SAD10320_P04_F12 | HC amino acid sequence |
| | | WVRQAPGQRLERMGWIDLENANTIYDAKFQGRVTIT | (ADI-57394) | |
| | | RDTSASTAYMELSSLRSEDTAVYYCARDAYGHEFYD | | |
| | | VWGQGTLVTVSS | | |
| Ab120 | 299 | DIVMTQSPDSLAVSLGERATINCKSSQSLLNARTGKN | SAD10320_P04_F12 | LC amino acid sequence |
| | | YLAWYQQKPGQPPKLLIYWASTRESGVPDRFSGSGS | (ADI-57394) | |
| | | GTDFTLTISSLQAEDVAVYYCKQSYSRRTFGGGTKVE | | |
| | | IK | | |
| Ab121 | 300 | QVQLVQSGAEVKKPGASVKVSCKASGYTFTAYTMH | SAD10319_P05_A01 | HC amino acid sequence |
| | | WVRQAPGHRLEWMGWINPDTGATDYSQKFQGRVTI | (ADI-57395) | |
| | | TRDTSASTAYMELSSLRSEDTAVYYCARDAYHHYFY | | |
| | | DVWGQGTLVTVSS | | |
| Ab121 | 301 | DIVMTQSPDSLAVSLGERATINCKSSQSLLNARTGKN | SAD10319_P05_A01 | LC amino acid sequence |
| | | YLAWYQQKPGQPPKLLIYWASTRESGVPDRFSGSGS | (ADI-57395) | |
| | | GTDFTLTISSLQAEDVAVYYCKQSYSRRTFGGGTKVE | | |
| | | IK | | |
| Ab122 | 302 | QVQLVQSGAEVKKPGASVKVSCKASGYTFASYDMH | SAD10319_P05_A02 | HC amino acid sequence |
| | | WVRQAPGQRLEWMGWIDAGTGATVYSQKFQGRVTI | (ADI-57396) | |
| | | TRDTSASTAYMELSSLRSEDTAVYYCARDAYGHYFY | | |
| | | DHWGQGTLVTVSS | | |
| Ab122 | 303 | DIVMTQSPDSLAVSLGERATINCKSSQSLLNARTGKN | SAD10319_P05_A02 | LC amino acid sequence |
| | | YLAWYQQKPGQPPKLLIYWASTRESGVPDRFSGSGS | (ADI-57396) | |
| | | GTDFTLTISSLQAEDVAVYYCKQSYSRRTFGGGTKVE | | |
| | | IK | | |
| Ab123 | 304 | QVQLVQSGAEVKKPGASVKVSCKASGYTFNDYAMH | SAD10319_P05_A03 | HC amino acid sequence |
| | | WVRQAPGQRLEWMGWIDAGTGNTYYSQKFQGRVTI | (ADI-57397) | |
| | | TRDTSASTAYMELSSLRSEDTAVYYCARDAHGHYFY | | |
| | | DVWGQGTLVTVSS | | |
| Ab123 | 305 | DIVMTQSPDSLAVSLGERATINCKSSQSLLNARTGKN | SAD10319_P05_A03 | LC amino acid sequence |
| | | YLAWYQQKPGQPPKLLIYWASTRESGVPDRFSGSGS | (ADI-57397) | |
| | | GTDFTLTISSLQAEDVAVYYCKQSYSRRTFGGGTKVE | | |
| | | IK | | |
| Ab124 | 306 | QVQLVQSGAEVKKPGASVKVSCKASGYTFTAYTMH | SAD10319_P05_A05 | HC amino acid sequence |
| | | WVRQAPGQRLEWMGWINPDTGATDYSQKFQGRVTI | (ADI-57398) | |
| | | TRDTSASTAYMELSSLRSEDTAVYYCARDAYHHYFY | | |
| | | DVWGQGTLVTVSS | | |
| Ab124 | 307 | DIVMTQSPDSLAVSLGERATINCKSSQSLLNARTGKN | SAD10319_P05_A05 | LC amino acid sequence |
| | | YLAWYQQKPGQPPKLLIYWASTRESGVPDRFSGSGS | (ADI-57398) | |
| | | GTDFTLTISSLQAEDVAVYYCKQSYSRRTFGGGTKVE | | |
| | | IK | | |
| Ab125 | 308 | QVQLVQSGAEVKEPGASVKVSCKASGFNIKDYYMH | SAD10318_P02_C04 | HC amino acid sequence |
| | | WVRQAPGQRLEWMGWIDLENANTIYDAKFQGRVTI | (ADI-48592) | |
| | | TRDTSASTAYMELSSLRSEDTAVYYCARDAHHRYFY | | |
| | | DVWGQGTLVTVSS | | |
| Ab125 | 309 | DIVMTQSPDSLAVSLGERATINCKSSQSLLNAHTGHN | SAD10318_P02_C04 | LC amino acid sequence |
| | | YLAWYQQKPGQPPKLLIYWASTRESGVPDRFSGSGS | (ADI-48592) | |
| | | GTDFTLTISSLQAEDVAVYYCKQSYSRRTFGGGTKVE | | |
| | | IK | | |
| Ab126 | 310 | QVQLVQSGAEVKKPGASVKVSCKASGYTFTSYNMH | SAD10319_P05_B02 | HC amino acid sequence |
| | | WVRQAPGPSLEWMGSIDAGTGATDYSQKFQGRVTIT | (ADI-57399) | |
| | | RDTSASTAYMELSSLRSEDTAVYYCARDAYHHYFYD | | |
| | | VWGQGTLVTVSS | | |
| Ab126 | 311 | DIVMTQSPDSLAVSLGERATINCKSSQSLLNARTGKN | SAD10319_P05_B02 | LC amino acid sequence |
| | | YLAWYQQKPGQPPKLLIYWASTRESGVPDRFSGSGS | (ADI-57399) | |
| | | GTDFTLTISSLQAEDVAVYYCKQSYSRRTFGGGTKVE | | |
| | | IK | | |
| Ab127 | 312 | QVQLVQSGAEVKKPGASVKVSCKASGYTFESYVMH | SAD10319_P05_B03 | HC amino acid sequence |
| | | WVRQAPGQRLEWMGWIHSGTGNTDYSQKFQGRVTI | (ADI-57400) | |
| | | TRDTSASTAYMELSSLRSEDTAVYYCARDAYGHYFY | | |
| | | DHWGQGTLVTVSS | | |
| Ab127 | 313 | DIVMTQSPDSLAVSLGERATINCKSSQSLLNARTGKN | SAD10319_P05_B03 | LC amino acid sequence |
| | | YLAWYQQKPGQPPKLLIYWASTRESGVPDRFSGSGS | (ADI-57400) | |
| | | GTDFTLTISSLQAEDVAVYYCKQSYSRRTFGGGTKVE | | |
| | | IK | | |
| Ab128 | 314 | QVQLVQSGAEVKKPGASVKVSCKASGYTFTSAVMH | SAD10319_P05_B04 | HC amino acid sequence |
| | | WVRQAPGQRLEWMGDINAGTGATDYSQKFQGRVTI | (ADI-57401) | |
| | | TRDTSASTAYMELSSLRSEDTAVYYCARDAYGRYFY | | |
| | | DVWGQGTLVTVSS | | |
| Ab128 | 315 | DIVMTQSPDSLAVSLGERATINCKSSQSLLNARTGKN | SAD10319_P05_B04 | LC amino acid sequence |
| | | YLAWYQQKPGQPPKLLIYWASTRESGVPDRFSGSGS | (ADI-57401) | |
| | | GTDFTLTISSLQAEDVAVYYCKQSYSRRTFGGGTKVE | | |
| | | IK | | |
| Ab129 | 316 | QVQLVQSGAEVKKPGASVKVSCKASGYTFVDYAMH | SAD10319_P05_B05 | HC amino acid sequence |
| | | WVRQAPGQRLEWMGWIDAGTGNTDYSQKFQGRVTI | (ADI-57402) | |
| | | TRDTSASTAYMELSSLRSEDTAVYYCARDAHGHYFY | | |
| | | DVWGQGTLVTVSS | | |
| Ab129 | 317 | DIVMTQSPDSLAVSLGERATINCKSSQSLLNARTGKN | SAD10319_P05_B05 | LC amino acid sequence |
| | | YLAWYQQKPGQPPKLLIYWASTRESGVPDRFSGSGS | (ADI-57402) | |
| | | GTDFTLTISSLQAEDVAVYYCKQSYSRRTFGGGTKVE | | |
| | | IK | | |
| Ab130 | 318 | QVQLVQSGAEVKKPGASVKVSCKASGYTFTDDAMH | SAD10319_P05_C01 | HC amino acid sequence |
| | | WVRQAPGQRLEWMGWIDAGTGNTYYSQKFQGRVTI | (ADI-57403) | |
| | | TRDTSASTAYMELSSLRSEDTAVYYCAHDAYGHYFY | | |
| | | DVWGQGTLVTVSS | | |
| Ab130 | 319 | DIVMTQSPDSLAVSLGERATINCKSSQSLLNARTGKN | SAD10319_P05_C01 | LC amino acid sequence |
| | | YLAWYQQKPGQPPKLLIYWASTRESGVPDRFSGSGS | (ADI-57403) | |
| | | GTDFTLTISSLQAEDVAVYYCKQSYSRRTFGGGTKVE | | |
| | | IK | | |
| Ab131 | 320 | QVQLVQSGAEVKKPGASVKVSCKASGYTFTSYNMH | SAD10319_P05_C03 | HC amino acid sequence |
| | | WVRQAPGQRLEWMGSIDAGTGATDYSQKFQGRVTI | (ADI-57404) | |
| | | TRDTSASTAYMELSSLRSEDTAVYYCARDAYHHYFY | | |
| | | DVWGQGTLVTVSS | | |
| Ab131 | 321 | DIVMTQSPDSLAVSLGERATINCKSSQSLLNARTGKN | SAD10319_P05_C03 | LC amino acid sequence |
| | | YLAWYQQKPGQPPKLLIYWASTRESGVPDRFSGSGS | (ADI-57404) | |
| | | GTDFTLTISSLQAEDVAVYYCKQSYSRRTFGGGTKVE | | |
| | | IK | | |
| Ab132 | 322 | QVQLVQSGAEVKKPGASVKVSCKASGYTFTSYNMH | SAD10319_P05_C05 | HC amino acid sequence |
| | | WVRQAPGPRLEWMGWIDAGTGATHYSQKFQGRVTI | (ADI-57405) | |
| | | TRDTSASTAYMELSSLRSEDTAVYYCARDAYHHYFY | | |
| | | DVWGQGTLVTVSS | | |
| Ab132 | 323 | DIVMTQSPDSLAVSLGERATINCKSSQSLLNARTGKN | SAD10319_P05_C05 | LC amino acid sequence |
| | | YLAWYQQKPGQPPKLLIYWASTRESGVPDRFSGSGS | (ADI-57405) | |
| | | GTDFTLTISSLQAEDVAVYYCKQSYSRRTFGGGTKVE | | |
| | | IK | | |
| Ab133 | 324 | QVQLVQSGAEVKKPGASVKVSCKASGYTFTEYDMH | SAD10319_P05_D01 | HC amino acid sequence |
| | | WVRQAPGQTLEWMGWIDAGTGATVYSQKFQGRVTI | (ADI-57406) | |
| | | TRDTSASTAYMELSSLRSEDTAVYYCARDAYGRYFY | | |
| | | DHWGQGTLVTVSS | | |
| Ab133 | 325 | DIVMTQSPDSLAVSLGERATINCKSSQSLLNARTGKN | SAD10319_P05_D01 | LC amino acid sequence |
| | | YLAWYQQKPGQPPKLLIYWASTRESGVPDRFSGSGS | (ADI-57406) | |
| | | GTDFTLTISSLQAEDVAVYYCKQSYSRRTFGGGTKVE | | |
| | | IK | | |
| Ab134 | 326 | QVQLVQSGAEVKKPGASVKVSCKASGYTFDSYTMH | SAD10319_P05_D02 | HC amino acid sequence |
| | | WVRQAPGPRLEWMGSINAGTGNTDYSQKFQGRVTIT | (ADI-57407) | |
| | | RDTSASTAYMELSSLRSEDTAVYYCARDHYGHYFYD | | |
| | | VWGQGTLVTVSS | | |
| Ab134 | 327 | DIVMTQSPDSLAVSLGERATINCKSSQSLLNARTGKN | SAD10319_P05_D02 | LC amino acid sequence |
| | | YLAWYQQKPGQPPKLLIYWASTRESGVPDRFSGSGS | (ADI-57407) | |
| | | GTDFTLTISSLQAEDVAVYYCKQSYSRRTFGGGTKVE | | |
| | | IK | | |
| Ab135 | 328 | QVQLVQSGAEVKKPGASVKVSCKASGYTFTDDAMH | SAD10319_P05_D03 | HC amino acid sequence |
| | | WVRQAPGHRLEWMGWIDAGTGNTYYSQKFQGRVTI | (ADI-57408) | |
| | | TRDTSASTAYMELSSLRSEDTAVYYCAHDAYGHYFY | | |
| | | DVWGQGTLVTVSS | | |
| Ab135 | 329 | DIVMTQSPDSLAVSLGERATINCKSSQSLLNARTGKN | SAD10319_P05_D03 | LC amino acid sequence |
| | | YLAWYQQKPGQPPKLLIYWASTRESGVPDRFSGSGS | (ADI-57408) | |
| | | GTDFTLTISSLQAEDVAVYYCKQSYSRRTFGGGTKVE | | |
| | | IK | | |
| Ab136 | 330 | QVQLVQSGAEVKKPGASVKVSCKASGFNIKDYYMH | SAD10318_P02_D04 | HC amino acid sequence |
| | | WVRQAPGQRLEWMGWIDLENANTIYDAKFQGRVTI | (ADI-57274) | |
| | | TRDTSASTAYMELSSLRSEDTAVYYCARDAHGRYFY | | |
| | | DHWGQGTLVTVSS | | |
| Ab136 | 331 | DIVMTQSPDSLAVSLGERATINCKSSQSLLNAHTGKN | SAD10318_P02_D04 | LC amino acid sequence |
| | | HLAWYQQKPGQPPKLLIYWASTRESGVPDRFSGSGS | (ADI-57274) | |
| | | GTDFTLTISSLQAEDVAVYYCKQSYSRRTFGGGTKVE | | |
| | | IK | | |
| Ab137 | 332 | QVQLVQSGAEVKKPGASVKVSCKASGYTFTSDYMH | SAD10319_P05_D04 | HC amino acid sequence |
| | | WVRQAPGQRLEWMGWINAGTGATDYSQKFQGRVTI | (ADI-57409) | |
| | | TRDTSASTAYMELSSLRSEDTAVYYCAHDAYGRYHY | | |
| | | DVWGQGTLVTVSS | | |
| Ab137 | 333 | DIVMTQSPDSLAVSLGERATINCKSSQSLLNARTGKN | SAD10319_P05_D04 | LC amino acid sequence |
| | | YLAWYQQKPGQPPKLLIYWASTRESGVPDRFSGSGS | (ADI-57409) | |
| | | GTDFTLTISSLQAEDVAVYYCKQSYSRRTFGGGTKVE | | |
| | | IK | | |
| Ab138 | 334 | QVQLVQSGAEVKKPGASVKVSCKASGYTFADYAMH | SAD10319_P05_D05 | HC amino acid sequence |
| | | WVRQAPGHRLEWMGDIIAGTGATKYSQKFQGRVTIT | (ADI-57410) | |
| | | RDTSASTAYMELSSLRSEDTAVYYCARDHYGHYFYD | | |
| | | VWGQGTLVTVSS | | |
| Ab138 | 335 | DIVMTQSPDSLAVSLGERATINCKSSQSLLNARTGKN | SAD10319_P05_D05 | LC amino acid sequence |
| | | YLAWYQQKPGQPPKLLIYWASTRESGVPDRFSGSGS | (ADI-57410) | |
| | | GTDFTLTISSLQAEDVAVYYCKQSYSRRTFGGGTKVE | | |
| | | IK | | |
| Ab139 | 336 | QVQLVQSGAEVKKPGASVKVSCKASGYTFTGYEMH | SAD10319_P05_E04 | HC amino acid sequence |
| | | WVRQAPGQRLEWMGWINPSTGNTVYSQKFQGRVTI | (ADI-57411) | |
| | | TRDTSASTAYMELSSLRSEDTAVYYCARDHYGHYFY | | |
| | | DVWGQGTLVTVSS | | |
| Ab139 | 337 | DIVMTQSPDSLAVSLGERATINCKSSQSLLNARTGKN | SAD10319_P05_E04 | LC amino acid sequence |
| | | YLAWYQQKPGQPPKLLIYWASTRESGVPDRFSGSGS | (ADI-57411) | |
| | | GTDFTLTISSLQAEDVAVYYCKQSYSRRTFGGGTKVE | | |
| | | IK | | |
| Ab140 | 338 | QVQLVQSGAEVKKPGASVKVSCKASGYTFTDDAMH | SAD10319_P05_F01 | HC amino acid sequence |
| | | WVRQAPGQSLEWMGWIDAGTGNTYYSQKFQGRVTI | (ADI-57412) | |
| | | TRDTSASTAYMELSSLRSEDTAVYYCAHDAYGHYFY | | |
| | | DVWGQGTLVTVSS | | |
| Ab140 | 339 | DIVMTQSPDSLAVSLGERATINCKSSQSLLNARTGKN | SAD10319_P05_F01 | LC amino acid sequence |
| | | YLAWYQQKPGQPPKLLIYWASTRESGVPDRFSGSGS | 9ADI-57412) | |
| | | GTDFTLTISSLQAEDVAVYYCKQSYSRRTFGGGTKVE | | |
| | | IK | | |
| Ab141 | 340 | QVQLVQSGAEVKKPGASVKVSCKASGYTFNNYAMH | SAD10319_P05_G01 | HC amino acid sequence |
| | | WVRQAPGQSLEWMGWIDAGTGNTDYSQKFQGRVTI | (ADI-57413) | |
| | | TRDTSASTAYMELSSLRSEDTAVYYCARDAHHRYFY | | |
| | | DVWGQGTLVTVSS | | |
| Ab141 | 341 | DIVMTQSPDSLAVSLGERATINCKSSQSLLNARTGKN | SAD10319_P05_G01 | LC amino acid sequence |
| | | YLAWYQQKPGQPPKLLIYWASTRESGVPDRFSGSGS | (ADI-57413) | |
| | | GTDFTLTISSLQAEDVAVYYCKQSYSRRTFGGGTKVE | | |
| | | I | | |
| Ab142 | 342 | QVQLVQSGAEVKKPGASVKVSCKASGYTFTTYAMH | SAD10319_P05_G02 | HC amino acid sequence |
| | | WVRQAPGQRLEWMGWIDPVTGNTKYSQKFQGRVTI | (ADI-57414) | |
| | | TRDTSASTAYMELSSLRSEDTAVYYCARDHYGRYFY | | |
| | | DHWGQGTLVTVSS | | |
| Ab142 | 343 | DIVMTQSPDSLAVSLGERATINCKSSQSLLNARTGKN | SAD10319_P05_G02 | LC amino acid sequence |
| | | YLAWYQQKPGQPPKLLIYWASTRESGVPDRFSGSGS | (ADI-57414) | |
| | | GTDFTLTISSLQAEDVAVYYCKQSYSRRTFGGGTKVE | | |
| | | IK | | |
| Ab143 | 344 | QVQLVQSGAEVKKPGASVKVSCKASGYTFHSYNMH | SAD10319_P05_G03 | HC amino acid sequence |
| | | WVRQAPGHRLEWMGWINPDTGATDYSQKFQGRVTI | (ADI-57415) | |
| | | TRDTSASTAYMELSSLRSEDTAVYYCARDAYGRYFY | | |
| | | DVWGQGTLVTVSS | | |
| Ab143 | 345 | DIVMTQSPDSLAVSLGERATINCKSSQSLLNARTGKN | SAD10319_P05_G03 | LC amino acid sequence |
| | | YLAWYQQKPGQPPKLLIYWASTRESGVPDRFSGSGS | (ADI-57415) | |
| | | GTDFTLTISSLQAEDVAVYYCKQSYSRRTFGGGTKVE | | |
| | | IK | | |
| Ab144 | 346 | QVQLVQSGAEVKKPGASVKVSCKASGYTFTSYGMH | SAD10319_P05_G04 | HC amino acid sequence |
| | | WVRQAPGQRLEWMGWIDPVTGATDYSQKFQGRVTI | (ADI-57416) | |
| | | TRDTSASTAYMELSSLRSEDTAVYYCARDAHGRYFY | | |
| | | DHWGQGTLVTVSS | | |
| Ab144 | 347 | DIVMTQSPDSLAVSLGERATINCKSSQSLLNARTGKN | SAD10319_P05_G04 | LC amino acid sequence |
| | | YLAWYQQKPGQPPKLLIYWASTRESGVPDRFSGSGS | (ADI-57416) | |
| | | GTDFTLTISSLQAEDVAVYYCKQSYSRRTFGGGTKVE | | |
| | | IK | | |
| Ab145 | 348 | QVQLVQSGAEVKKPGASVKVSCKASGYTFTEYDMH | SAD10319_P05_H06 | HC amino acid sequence |
| | | WVRQAPGPTLEWMGWIDAGTGATVYSQKFQGRVTI | (ADI-57417) | |
| | | TRDTSASTAYMELSSLRSEDTAVYYCARDAYGRYFY | | |
| | | DHWGQGTLVTVSS | | |
| Ab145 | 349 | DIVMTQSPDSLAVSLGERATINCKSSQSLLNARTGKN | SAD10319_P05_H06 | LC amino acid sequence |
| | | YLAWYQQKPGQPPKLLIYWASTRESGVPDRFSGSGS | (ADI-57417) | |
| | | GTDFTLTISSLQAEDVAVYYCKQSYSRRTFGGGTKVE | | |
| | | IK | | |
| Ab146 | 350 | QVQLVQSGAEVKKPGASVKVSCKASGYTFHSYEMH | SAD10319_P06_A07 | HC amino acid sequence |
| | | WVRQAPGQRLEWMGWITAGTGSTKYSQKFQGRVTI | (ADI-57418) | |
| | | TRDTSASTAYMELSSLRSEDTAVYYCARDAYGHYFY | | |
| | | DHWGQGTLVTVSS | | |
| Ab146 | 351 | DIVMTQSPDSLAVSLGERATINCKSSQSLLNARTGKN | SAD10319_P06_A07 | LC amino acid sequence |
| | | YLAWYQQKPGQPPKLLIYWASTRESGVPDRFSGSGS | (ADI-57418) | |
| | | GTDFTLTISSLQAEDVAVYYCKQSYSRRTFGGGTKVE | | |
| | | IK | | |
| Ab147 | 352 | QVQLVQSGAEVKKPGASVKVSCKASGFNIKDYYMH | SAD10318_P02_E04 | HC amino acid sequence |
| | | WVRQAPGQRLEWMGWIDLENANTIYDAKFQGRVTI | (ADI-57275) | |
| | | TRDTSASTAYMELSSLRSEDTAVYYCARDHHGRYFY | | |
| | | DVWGQGTLVTVSS | | |
| Ab147 | 353 | DIVMTQSPDSLAVSLGERATINCKSSQSLLNAHTGKN | SAD10318_P02_E04 | LC amino acid sequence |
| | | YLAWYQQKPGQPPKLLIYWASTRESGVPDRFSGSGS | (ADI-57275) | |
| | | GTDFTLTISSLQAEDVAVYYCKQSYSRRTFGGGTKVE | | |
| | | IK | | |
| Ab148 | 354 | QVQLVQSGAEVKKPGASVKVSCKASGYTFTGYEMH | SAD10319_P06_A10 | HC amino acid sequence |
| | | WVRQAPGQRLEWMGWINPVTGATAYSQKFQGRVTI | (ADI-57419) | |
| | | TRDTSASTAYMELSSLRSEDTAVYYCARDAYGHYFY | | |
| | | DHWGQGTLVTVSS | | |
| Ab148 | 355 | DIVMTQSPDSLAVSLGERATINCKSSQSLLNARTGKN | SAD10319_P06_A10 | LC amino acid sequence |
| | | YLAWYQQKPGQPPKLLIYWASTRESGVPDRFSGSGS | (ADI-57419) | |
| | | GTDFTLTISSLQAEDVAVYYCKQSYSRRTFGGGTKVE | | |
| | | IK | | |
| Ab149 | 356 | QVQLVQSGAEVKKPGASVKVSCKASGYTFDSIAMH | SAD10319_P06_A11 | HC amino acid sequence |
| | | WVRQAPGQRLEWMGWINPATGNTDYSQKFQGRVTI | (ADI-57420) | |
| | | TRDTSASTAYMELSSLRSEDTAVYYCARDAYGHYFY | | |
| | | DHWGQGTLVTVSS | | |
| Ab149 | 357 | DIVMTQSPDSLAVSLGERATINCKSSQSLLNARTGKN | SAD10319_P06_A11 | LC amino acid sequence |
| | | YLAWYQQKPGQPPKLLIYWASTRESGVPDRFSGSGS | (ADI-57420) | |
| | | GTDFTLTISSLQAEDVAVYYCKQSYSRRTFGGGTKVE | | |
| | | IK | | |
| Ab150 | 358 | QVQLVQSGAEVKKPGASVKVSCKASGYTFTEYVMH | SAD10319_P06_B10 | HC amino acid sequence |
| | | WVRQAPGQRLEWMGDIDAGTGATKYSQKFQGRVTI | (ADI-57421) | |
| | | TRDTSASTAYMELSSLRSEDTAVYYCARDAYHHYFY | | |
| | | DVWGQGTLVTVSS | | |
| Ab150 | 359 | DIVMTQSPDSLAVSLGERATINCKSSQSLLNARTGKN | SAD10319_P06_B10 | LC amino acid sequence |
| | | YLAWYQQKPGQPPKLLIYWASTRESGVPDRFSGSGS | (ADI-57421) | |
| | | GTDFTLTISSLQAEDVAVYYCKQSYSRRTFGGGTKVE | | |
| | | IK | | |
| Ab151 | 360 | QVQLVQSGAEVKKPGASVKVSCKASGYTFHSYDMH | SAD10319_P06_B11 | HC amino acid sequence |
| | | WVRQAPGQRLEWMGWIDAGTGATTYSQKFQGRVTI | (ADI-57422) | |
| | | TRDTSASTAYMELSSLRSEDTAVYYCARDAYGHYFY | | |
| | | DVWGQGTLVTVSS | | |
| Ab151 | 361 | DIVMTQSPDSLAVSLGERATINCKSSQSLLNARTGKN | SAD10319_P06_B11 | LC amino acid sequence |
| | | YLAWYQQKPGQPPKLLIYWASTRESGVPDRFSGSGS | (ADI-57422) | |
| | | GTDFTLTISSLQAEDVAVYYCKQSYSRRTFGGGTKVE | | |
| | | IK | | |
| Ab152 | 362 | QVQLVQSGAEVKKPGASVKVSCKASGYTFTEYVMH | SAD10319_P06_C10 | HC amino acid sequence |
| | | WVRQAPGPRLEWMGDIDAGTGATKYSQKFQGRVTI | (ADI-57423) | |
| | | TRDTSASTAYMELSSLRSEDTAVYYCARDAYHHYFY | | |
| | | DVWGQGTLVTVSS | | |
| Ab152 | 363 | DIVMTQSPDSLAVSLGERATINCKSSQSLLNARTGKN | SAD10319_P06_C10 | LC amino acid sequence |
| | | YLAWYQQKPGQPPKLLIYWASTRESGVPDRFSGSGS | (ADI-57423) | |
| | | GTDFTLTISSLQAEDVAVYYCKQSYSRRTFGGGTKVE | | |
| | | IK | | |
| Ab153 | 364 | QVQLVQSGAEVKKPGASVKVSCKASGYTFDSYEMH | SAD10319_P06_C12 | HC amino acid sequence |
| | | WVRQAPGHRLEWMGWINPLTGATKYSQKFQGRVTI | (ADI-57424) | |
| | | TRDTSASTAYMELSSLRSEDTAVYYCARDHYGHYFY | | |
| | | DVWGQGTLVTVSS | | |
| Ab153 | 365 | DIVMTQSPDSLAVSLGERATINCKSSQSLLNARTGKN | SAD10319_P06_C12 | LC amino acid sequence |
| | | YLAWYQQKPGQPPKLLIYWASTRESGVPDRFSGSGS | (ADI-57424) | |
| | | GTDFTLTISSLQAEDVAVYYCKQSYSRRTFGGGTKVE | | |
| | | IK | | |
| Ab154 | 366 | QVQLVQSGAEVKKPGASVKVSCKASGYTFNRYVMH | SAD10319_P06_D12 | HC amino acid sequence |
| | | WVRQAPGQRLEWMGGIDAGTGATKYSQKFQGRVTI | (ADI-57425) | |
| | | TRDTSASTAYMELSSLRSEDTAVYYCARDAHRHYFY | | |
| | | DVWGQGTLVTVS | | |
| Ab154 | 367 | DIVMTQSPDSLAVSLGERATINCKSSQSLLNARTGKN | SAD10319_P06_D12 | LC amino acid sequence |
| | | YLAWYQQKPGQPPKLLIYWASTRESGVPDRFSGSGS | (ADI-57425) | |
| | | GTDFTLTISSLQAEDVAVYYCKQSYSRRTFGGGTKVE | | |
| | | IK | | |
| Ab155 | 368 | QVQLVQSGAEVKKPGASVKVSCKASGYTFIKYVMH | SAD10319_P06_E08 | HC amino acid sequence |
| | | WVRQAPGQRLEWMGDIDPDTGATEYSQKFQGRVTIT | (ADI-57426) | |
| | | RDTSASTAYMELSSLRSEDTAVYYCARDDYHHYFYD | | |
| | | VWGQGTLVTVSS | | |
| Ab155 | 369 | DIVMTQSPDSLAVSLGERATINCKSSQSLLNARTGKN | SAD10319_P06_E08 | LC amino acid sequence |
| | | YLAWYQQKPGQPPKLLIYWASTRESGVPDRFSGSGS | (ADI-57426) | |
| | | GTDFTLTISSLQAEDVAVYYCKQSYSRRTFGGGTKVE | | |
| | | IK | | |
| Ab156 | 370 | QVQLVQSGAEVKKPGASVKVSCKASGYTFTAYDMH | SAD10319_P06_E09 | HC amino acid sequence |
| | | WVRQAPGQRLEWMGWINPDTGATVYSQKFQGRVTI | (ADI-57427) | |
| | | TRDTSASTAYMELSSLRSEDTAVYYCARDAYGRYFY | | |
| | | DVWGQGTLVTVSS | | |
| Ab156 | 371 | DIVMTQSPDSLAVSLGERATINCKSSQSLLNARTGKN | SAD10319_P06_E09 | LC amino acid sequence |
| | | YLAWYQQKPGQPPKLLIYWASTRESGVPDRFSGSGS | (ADI-57427) | |
| | | GTDFTLTISSLQAEDVAVYYCKQSYSRRTFGGGTKVE | | |
| | | IK | | |
| Ab157 | 372 | QVQLVQSGAEVKKPGASVKVSCKASGYTFTQYDMH | SAD10319_P06_E10 | HC amino acid sequence |
| | | WVRQAPGQTLEWMGDINAGTGVTVYSQKFQGRVTI | (ADI-57428) | |
| | | TRDTSASTAYMELSSLRSEDTAVYYCARDAYGRYFY | | |
| | | DVWGQGTLVTVSS | | |
| Ab157 | 373 | DIVMTQSPDSLAVSLGERATINCKSSQSLLNARTGKN | SAD10319_P06_E10 | LC amino acid sequence |
| | | YLAWYQQKPGQPPKLLIYWASTRESGVPDRFSGSGS | (ADI-57428) | |
| | | GTDFTLTISSLQAEDVAVYYCKQSYSRRTFGGGTKVE | | |
| | | IK | | |
| Ab158 | 374 | QVQLVQSGAEVKKPGASVKVSCKASGFNIKDYYMH | SAD10318_P02_G04 | HC amino acid sequence |
| | | WVRQAPGQRLEWMGWIDLENANTIYDAKFQGRVTI | (ADI-48593) | |
| | | TRDTSASTAYMELSSLRSEDTAVYYCARDAYGHYHY | | |
| | | DVWGQGTLVTVSS | | |
| Ab158 | 375 | DIVMTQSPDSLAVSLGERATINCKSSQSLLHARTGKN | SAD10318_P02_G04 | LC amino acid sequence |
| | | YLAWYQQKPGQPPKLLIYWASTRESGVPDRFSGSGS | (ADI-48593) | |
| | | GTDFTLTISSLQAEDVAVYYCKQSYHHRTFGGGTKV | | |
| | | EIK | | |
| Ab159 | 376 | QVQLVQSGAEVKKPGASVKVSCKASGYTFESYDMH | SAD10319_P06_F07 | HC amino acid sequence |
| | | WVRQAPGQPLEWMGWIDAGTGATTYSQKFQGRVTI | (ADI-57429) | |
| | | TRDTSASTAYMELSSLRSEDTAVYYCARDAYHHYFY | | |
| | | DVWGQGTLVTVSS | | |
| Ab159 | 377 | DIVMTQSPDSLAVSLGERATINCKSSQSLLNARTGKN | SAD10319_P06_F07 | LC amino acid sequence |
| | | YLAWYQQKPGQPPKLLIYWASTRESGVPDRFSGSGS | (ADI-57429) | |
| | | GTDFTLTISSLQAEDVAVYYCKQSYSRRTFGGGTKVE | | |
| | | IK | | |
| Ab160 | 378 | QVQLVQSGAEVKKPGASVKVSCKASGYTFVSYDMH | SAD10319_P06_F10 | HC amino acid sequence |
| | | WVRQAPGPSLEWMGWIDPNTGATVYSQKFQGRVTI | (ADI-57430) | |
| | | TRDTSASTAYMELSSLRSEDTAVYYCARDHYGHYFY | | |
| | | DVWGQGTLVTVSS | | |
| Ab160 | 379 | DIVMTQSPDSLAVSLGERATINCKSSQSLLNARTGKN | SAD10319_P06_F10 | LC amino acid sequence |
| | | YLAWYQQKPGQPPKLLIYWASTRESGVPDRFSGSGS | (ADI-57430) | |
| | | GTDFTLTISSLQAEDVAVYYCKQSYSRRTFGGGTKVE | | |
| | | IK | | |
| Ab161 | 380 | QVQLVQSGAEVKKPGASVKVSCKASGYTFESYDMH | SAD10319_P06_G09 | HC amino acid sequence |
| | | WVRQAPGPRLEWMGWIDAGTGATTYSQKFQGRVTI | (ADI-57431) | |
| | | TRDTSASTAYMELSSLRSEDTAVYYCARDAYHHYFY | | |
| | | DVWGQGTLVTVSS | | |
| Ab161 | 381 | DIVMTQSPDSLAVSLGERATINCKSSQSLLNARTGKN | SAD10319_P06_G09 | LC amino acid sequence |
| | | YLAWYQQKPGQPPKLLIYWASTRESGVPDRFSGSGS | (ADI-57431) | |
| | | GTDFTLTISSLQAEDVAVYYCKQSYSRRTFGGGTKVE | | |
| | | IK | | |
| Ab162 | 382 | QVQLVQSGAEVKKPGASVKVSCKASGYTFTDYDMH | SAD10319_P06_G11 | HC amino acid sequence |
| | | WVRQAPGQRLEWMGWINAGDAATVYSQKFQGRVTI | (ADI-57432) | |
| | | TRDTSASTAYMELSSLRSEDTAVYYCARDAYGHYFY | | |
| | | DHWGQGTLVTVSS | | |
| Ab162 | 383 | DIVMTQSPDSLAVSLGERATINCKSSQSLLNARTGKN | SAD10319_P06_G11 | LC amino acid sequence |
| | | YLAWYQQKPGQPPKLLIYWASTRESGVPDRFSGSGS | (ADI-57432) | |
| | | GTDFTLTISSLQAEDVAVYYCKQSYSRRTFGGGTKVE | | |
| | | IK | | |
| Ab163 | 384 | QVQLVQSGAEVKKPGASVKVSCKASGYTFVSYNMH | SAD10319_P06_H07 | HC amino acid sequence |
| | | WVRQAPGQRLEWMGSINAGDANTKYSQKFQGRVTI | (ADI-57433) | |
| | | TRDTSASTAYMELSSLRSEDTAVYYCARDHYGHYFY | | |
| | | DVWGQGTLVTVSS | | |
| Ab163 | 385 | DIVMTQSPDSLAVSLGERATINCKSSQSLLNARTGKN | SAD10319_P06_H07 | LC amino acid sequence |
| | | YLAWYQQKPGQPPKLLIYWASTRESGVPDRFSGSGS | (ADI-57433) | |
| | | GTDFTLTISSLQAEDVAVYYCKQSYSRRTFGGGTKVE | | |
| | | IK | | |
| Ab164 | 386 | QVQLVQSGAEVKKPGASVKVSCKASGYTFESYDMH | SAD10319_P06_H08 | HC amino acid sequence |
| | | WVRQAPGQTLEWMGWIDAGTGATTYSQKFQGRVTI | (ADI-57434) | |
| | | TRDTSASTAYMELSSLRSEDTAVYYCARDAYHHYFY | | |
| | | DVWGQGTLVTVSS | | |
| Ab164 | 387 | DIVMTQSPDSLAVSLGERATINCKSSQSLLNARTGKN | SAD10319_P06_H08 | LC amino acid sequence |
| | | YLAWYQQKPGQPPKLLIYWASTRESGVPDRFSGSGS | (ADI-57434) | |
| | | GTDFTLTISSLQAEDVAVYYCKQSYSRRTFGGGTKVE | | |
| | | IK | | |
| Ab165 | 388 | QVQLVQSGAEVKKPGASVKVSCKASGYTFESYDMH | SAD10319_P06_H10 | HC amino acid sequence |
| | | WVRQAPGPRLEWMGWIDAGTGNTKYSQKFQGRVTI | (ADI-57435) | |
| | | TADESTSTAYMELSSLRSEDTAVYYCARDHYGHYFY | | |
| | | DVWGQGTLVTVSS | | |
| Ab165 | 389 | DIVMTQSPDSLAVSLGERATINCKSSQSLLNARTGKN | SAD10319_P06_H10 | LC amino acid sequence |
| | | YLAWYQQKPGQPPKLLIYWASTRESGVPDRFSGSGS | (ADI-57435) | |
| | | GTDFTLTISSLQAEDVAVYYCKQSYSRRTFGGGTKVE | | |
| | | IK | | |
| Ab166 | 390 | QVQLVQSGAEVKKPGASVKVSCKASGYTFTDYDMH | SAD10319_P06_H11 | HC amino acid sequence |
| | | WVRQAPGHRLEWMGWINAGDAATVYSQKFQGRVTI | (ADI-57436) | |
| | | TRDTSASTAYMELSSLRSEDTAVYYCARDAYGHYFY | | |
| | | DHWGQGTLVTVSS | | |
| Ab166 | 391 | DIVMTQSPDSLAVSLGERATINCKSSQSLLNARTGKN | SAD10319_P06_H11 | LC amino acid sequence |
| | | YLAWYQQKPGQPPKLLIYWASTRESGVPDRFSGSGS | (ADI-57436) | |
| | | GTDFTLTISSLQAEDVAVYYCKQSYSRRTFGGGTKVE | | |
| | | IK | | |
| Ab167 | 392 | QVQLVQSGAEVKKPGASVKVSCKASGFNIKDYYMH | LAD9953_P01_H01 | HC amino acid sequence |
| | | WVRQAPGQRLEWMGWIDLENANTIYDAKFQGRVTI | (ADI-57437) | |
| | | TRDTSASTAYMELSSLRSEDTAVYYCARDAYGRYFY | | |
| | | DVWGQGTLVTVSS | | |
| Ab167 | 393 | DIVMTQSPDSLAVSLGERATINCKSSQSLLHARTHKN | LAD9953_P01_H01 | LC amino acid sequence |
| | | YLAWYQQKPGQPPKLLIYWASTRESGVPDRFSGSGS | (ADI-57437) | |
| | | GTDFTLTISSLQAEDVAVYYCKQSYSRRTFGGGTKVE | | |
| | | IK | | |
| Ab168 | 394 | QVQLVQSGAEVKKPGASVKVSCKASGFNIKDYYMH | LAD9954_P01_B02 | HC amino acid sequence |
| | | WVRQAPGQRLEWMGWIDLENANTIYDAKFQGRVTI | (ADI-57438) | |
| | | TRDTSASTAYMELSSLRSEDTAVYYCARDAYGRYFY | | |
| | | DVWGQGTLVTVSS | | |
| Ab168 | 395 | DIVMTQSPDSLAVSLGERATINCKSSQSLLHARTGHN | LAD9954_P01_B02 | LC amino acid sequence |
| | | YLAWYQQKPGQPPKLLIYWASTRESGVPDRFSGSGS | (ADI-57438) | |
| | | GTDFTLTISSLQAEDVAVYYCKQSYSRRTFGGGTKVE | | |
| | | IK | | |
| Ab169 | 396 | QVQLVQSGAEVKKPGASVKVSCKASGFNIKDYYMH | SAD10318_P02_H04 | HC amino acid sequence |
| | | WVRQAPGQRLEWMGWIDLENANTIYDAKFQGRVTI | (ADI-48594) | |
| | | TRDTSASTAYMELSSLRSEDTAVYYCARDAYHRYFY | | |
| | | DHWGQGTLVTVSS | | |
| Ab169 | 397 | DIVMTQSPDSLAVSLGERATINCKSSQSLLHARTGHN | SAD10318_P02_H04 | LC amino acid sequence |
| | | YLAWYQQKPGQPPKLLIYWASTRESGVPDRFSGSGS | (ADI-48594) | |
| | | GTDFTLTISSLQAEDVAVYYCKQSYSRRTFGGGTKVE | | |
| | | IK | | |
| Ab170 | 398 | QVQLVQSGAEVKKPGASVKVSCKASGFNIKDYYMH | LAD9955_P01_G02 | HC amino acid sequence |
| | | WVRQAPGQRLEWMGWIDLENANTIYDAKFQGRVTI | (ADI-57439) | |
| | | TRDTSASTAYMELSSLRSEDTAVYYCARDAYGRYFY | | |
| | | DVWGQGTLVTVSS | | |
| Ab170 | 399 | DIVMTQSPDSLAVSLGERATINCKSSQSLLHARTGKN | LAD9955_P01_G02 | LC amino acid sequence |
| | | HLAWYQQKPGQPPKLLIYWASTRESGVPDRFSGSGS | (ADI-57439) | |
| | | GTDFTLTISSLQAEDVAVYYCKQSYSRRTFGGGTKVE | | |
| | | IK | | |
| Ab171 | 400 | QVQLVQSGAEVKKPGASVKVSCKASGFNIKDYYMH | LAD9956_P01_C03 | HC amino acid sequence |
| | | WVRQAPGQRLEWMGWIDLENANTIYDAKFQGRVTI | (ADI-57440) | |
| | | TRDTSASTAYMELSSLRSEDTAVYYCARDAYGRYFY | | |
| | | DVWGQGTLVTVSS | | |
| Ab171 | 401 | DIVMTQSPDSLAVSLGERATINCKSSQSLLNAHTHKN | LAD9956_P01_C03 | LC amino acid sequence |
| | | YLAWYQQKPGQPPKLLIYWASTRESGVPDRFSGSGS | (ADI-57440) | |
| | | GTDFTLTISSLQAEDVAVYYCKQSYSRRTFGGGTKVE | | |
| | | IK | | |
| Ab172 | 402 | QVQLVQSGAEVKKPGASVKVSCKASGFNIKDYYMH | LAD9959_P01_E04 | HC amino acid sequence |
| | | WVRQAPGQRLEWMGWIDLENANTIYDAKFQGRVTI | (ADI-57441) | |
| | | TRDTSASTAYMELSSLRSEDTAVYYCARDAYGRYFY | | |
| | | DVWGQGTLVTVSS | | |
| Ab172 | 403 | DIVMTQSPDSLAVSLGERATINCKSSQSLLNARTHHN | LAD9959_P01_E04 | LC amino acid sequence |
| | | YLAWYQQKPGQPPKLLIYWASTRESGVPDRFSGSGS | (ADI-57441) | |
| | | GTDFTLTISSLQAEDVAVYYCKQSYSRRTFGGGTKVE | | |
| | | IK | | |
| Ab173 | 404 | QVQLVQSGAEVKKPGASVKVSCKASGFNIKDYYMH | LAD9960_P01_D05 | HC amino acid sequence |
| | | WVRQAPGQRLEWMGWIDLENANTIYDAKFQGRVTI | (ADI-57442) | |
| | | TRDTSASTAYMELSSLRSEDTAVYYCARDAYGRYFY | | |
| | | DVWGQGTLVTVSS | | |
| Ab173 | 405 | DIVMTQSPDSLAVSLGERATINCKSSQSLLNARTHKN | LAD9960_P01_D05 | LC amino acid sequence |
| | | HLAWYQQKPGQPPKLLIYWASTRESGVPDRFSGSGS | (ADI-57442) | |
| | | GTDFTLTISSLQAEDVAVYYCKQSYSRRTFGGGTKVE | | |
| | | IK | | |
| Ab174 | 406 | QVQLVQSGAEVKKPGASVKVSCKASGFNIKDYYMH | LAD9963_P01_E06 | HC amino acid sequence |
| | | WVRQAPGQRLEWMGWIDLENANTIYDAKFQGRVTI | (ADI-57443) | |
| | | TRDTSASTAYMELSSLRSEDTAVYYCARDAYGRYFY | | |
| | | DVWGQGTLVTVSS | | |
| Ab174 | 407 | DIVMTQSPDSLAVSLGERATINCKSSQSLLNAHTGKN | LAD9963_P01_E06 | LC amino acid sequence |
| | | YLAWYQQKPGQPPKLLIYWASTRESGVPDRFSGSGS | (ADI-57443) | |
| | | GTDFTLTISSLQAEDVAVYYCKQSYSRRTFGGGTKVE | | |
| | | I | | |
| Ab175 | 408 | QVQLVQSGAEVKKPGASVKVSCKASGFNIKDYYMH | LAD9964_P01_C07 | HC amino acid sequence |
| | | WVRQAPGQRLEWMGWIDLENANTIYDAKFQGRVTI | (ADI-57444) | |
| | | TRDTSASTAYMELSSLRSEDTAVYYCARDAYGRYFY | | |
| | | DVWGQGTLVTVS | | |
| Ab175 | 409 | DIVMTQSPDSLAVSLGERATINCKSSQSLLNARTHKN | LAD9964_P01_C07 | LC amino acid sequence |
| | | YLAWYQQKPGQPPKLLIYWASTRESGVPDRFSGSGS | (ADI-57444) | |
| | | GTDFTLTISSLQAEDVAVYYCKQSYSRRTFGGGTKVE | | |
| | | IK | | |
| Ab176 | 410 | QVQLVQSGAEVKKPGASVKVSCKASGFNIKDYYMH | LAD9966_P01_A08 | HC amino acid sequence |
| | | WVRQAPGQRLEWMGWIDLENANTIYDAKFQGRVTI | (ADI-57445) | |
| | | TRDTSASTAYMELSSLRSEDTAVYYCARDAYGRYFY | | |
| | | DVWGQGTLVTVSS | | |
| Ab176 | 411 | DIVMTQSPDSLAVSLGERATINCKSSQSLLNARTGKN | LAD9966_P01_A08 | LC amino acid sequence |
| | | HLAWYQQKPGQPPKLLIYWASTRESGVPDRFSGSGS | (ADI-57445) | |
| | | GTDFTLTISSLQAEDVAVYYCKQSYSRRTFGGGTKVE | | |
| | | IK | | |
| Ab177 | 412 | QVQLVQSGAEVKKPGASVKVSCKASGFNIKDYYMH | LAD9965_P01_H07 | HC amino acid sequence |
| | | WVRQAPGQRLEWMGWIDLENANTIYDAKFQGRVTI | (ADI-48666) | |
| | | TRDTSASTAYMELSSLRSEDTAVYYCARDAYGRYFY | | |
| | | DVWGQGTLVTVSS | | |
| Ab177 | 413 | DIVMTQSPDSLAVSLGERATINCKSSQSLLNARTGHN | LAD9965_P01_H07 | LC amino acid sequence |
| | | YLAWYQQKPGQPPKLLIYWASTRESGVPDRFSGSGS | (ADI-48666) | |
| | | GTDFTLTISSLQAEDVAVYYCKQSYSRRTFGGGTKVE | | |
| | | IK | | |
| Ab178 | 414 | QVQLVQSGTEVKKPGASVKVSCKASGFNIKDYYMH | SAD10318_P02_A05 | HC amino acid sequence |
| | | WVRQAPGQRLEWMGWIDLENANTIYDAKFQGRVTI | (ADI-48595) | |
| | | TRDTSASTAYMELSSLRSEDTAVYYCARDAYHRYFY | | |
| | | DHWGQGTLVTVSS | | |
| Ab178 | 415 | DIVMTQSPDSLAVSLGERATINCKSSQSLLNSHTGKN | SAD10318_P02_A05 | LC amino acid sequence |
| | | YLAWYQQKPGQPPKLLIYWASTRESGVPDRFSGSGS | (ADI-48595) | |
| | | GTDFTLTISSLQAEDVAVYYCKQSYSRRTFGGGTKVE | | |
| | | IK | | |
| Ab179 | 416 | QVQLVQSGAEVKKPGASVKVSCKASGFNIKDYYMH | SAD10318_P02_B05 | HC amino acid sequence |
| | | WVRQAPGQRLEWMGWIDLENANTIYDAKFQGRVTI | (ADI-48596) | |
| | | TRDTSASTAYMELSSLRSEDTAVYYCARDAYGRHFY | | |
| | | DHWGQGTLVTVSS | | |
| Ab179 | 417 | DIVMTQSPDSLAVSLGERATINCKSSQSLLNAHTGKN | SAD10318_P02_B05 | LC amino acid sequence |
| | | YLAWYQQKPGQPPKLLIYWASTRESGVPDRFSGSGS | (ADI-48596) | |
| | | GTDFTLTISSLQAEDVAVYYCKQSYSRRTFGGGTKVE | | |
| | | IK | | |
| Ab180 | 418 | QVQLVQSGAEVKKPGASVKVSCKASGFNIKDYYMH | SAD10318_P02_C05 | HC amino acid sequence |
| | | WVRQAPGQRLEWMGWIDLENANTIYDAKFQGRVTI | (ADI-48597) | |
| | | TRDTSASTAYMELSSLRSEDTAVYYCARDAHHRYFY | | |
| | | DVWGQGTLVTVSS | | |
| Ab180 | 419 | DIVMTQSPDSLAVSLGERATINCKSSQSLLNARTGHN | SAD10318_P02_C05 | LC amino acid sequence |
| | | HLAWYQQKPGQPPKLLIYWASTRESGVPDRFSGSGS | (ADI-48597) | |
| | | GTDFTLTISSLQAEDVAVYYCKQSHSHRTFGGGTKVE | | |
| | | I | | |
| Ab181 | 420 | QVQLVQSGAEVKKPGASVKVSCKASGFNIKDYYMH | SAD10318_P02_D05 | HC amino acid sequence |
| | | WVRQAPGQRLEWMGWIDLENANTIYDAKFQGRVTI | (ADI-48598) | |
| | | TRDTSASTAYMELSSLRSEDTAVYYCARDHYGHYFY | | |
| | | DVWGQGTLVTVSS | | |
| Ab181 | 421 | DIVMTQSPDSLAVSLGERATINCKSSQSLLNARTGKN | SAD10318_P02_D05 | LC amino acid sequence |
| | | HLAWYQQKPGQPPKLLIYWASTRESGVPDRFSGSGS | (ADI-48598) | |
| | | GTDFTLTISSLQAEDVAVYYCKQSYHHRTFGGGTKV | | |
| | | EIK | | |
| Ab182 | 422 | QVQLVQSGAEVKKPGASVKVSCKASGFNIKDYYMH | SAD10318_P01_D01 | HC amino acid sequence |
| | | WVRQAPGQRLEWMGWIDLENANTIYDAKFQGRVTI | (ADI-48576) | |
| | | TRDTSASTAYMELSSLRSEDTAVYYCARDAYHRYFY | | |
| | | DHWGQGTLVTVSS | | |
| Ab182 | 423 | DIVMTQSPDSLAVSLGERATINCKSSQSLLNAHTGKN | SAD10318_P01_D01 | LC amino acid sequence |
| | | HLAWYQQKPGQPPKLLIYWASTRESGVPDRFSGSGS | (ADI-48576) | |
| | | GTDFTLTISSLQAEDVAVYYCKQSHSHRTFGGGTKVE | | |
| | | IK | | |
| Ab183 | 424 | QVQLVQSGAEVKKPGASVKVSCKASGFNIKDYYMH | SAD10318_P02_F05 | HC amino acid sequence |
| | | WVRQAPGQRLEWMGWIDLENANTIYDAKFQGRVTI | (ADI-57276) | |
| | | TRDTSASTAYMELSSLRSEDTAVYYCARDAYGHYFY | | |
| | | DHWGQGTLVTVSS | | |
| Ab183 | 425 | GIVMTQSPDSLAVSLGERATINCKSSQSLLNAHTGKN | SAD10318_P02_F05 | LC amino acid sequence |
| | | HLAWYQQKPGQPPKLLIYWASTRESGVPDRFSGSGS | (ADI-57276) | |
| | | GTDFTLTISSLQAEDVAVYYCKQSHSRRTFGGGTKVE | | |
| | | IK | | |
| Ab184 | 426 | QVQLVQSGAEVKKPGASVKVSCKASGFNIKDYYMH | SAD10318_P02_G05 | HC amino acid sequence |
| | | WVRQAPGQRLEWMGWIDLENANTIYDAKFQGRVTI | (ADI-57277) | |
| | | TRDTSASTAYMELSSLRSEDTAVYYCARDAYGRYFY | | |
| | | DVWGQGTLVTVSS | | |
| Ab184 | 427 | DIVMTQSPDSLAVSLGERATINCKSSQSLLNARTHKN | SAD10318_P02_G05 | LC amino acid sequence |
| | | HLAWYQQKPGQPPKLLIYWASTRESGVPDRFSGSGS | (ADI-57277) | |
| | | GTDFTLTISSLQAEDVAVYYCKQSHSRRHFGGGTKV | | |
| | | EIK | | |
| Ab185 | 428 | QVQLVQSGAEVKKPGASVKVSCKASGFNIKDYYMH | SAD10318_P02_H05 | HC amino acid sequence |
| | | WVRQAPGQRLEWMGWIDLENANTIYDAKFQGRVTI | (ADI-48599) | |
| | | TRDTSASTAYMELSSLRSEDTAVYYCARDAYGHHFY | | |
| | | DVWGQGTLVTVSS | | |
| Ab185 | 429 | DIVMTQSPDSLAVSLGERATINCKSSQSLLNRHTGKN | SAD10318_P02_H05 | LC amino acid sequence |
| | | YLAWYQQKPGQPPKLLIYWASTRESGVPDRFSGSGS | (ADI-48599) | |
| | | GTDFTLTISSLQAEDVAVYYCKQSYSRRTFGGGTKVE | | |
| | | IK | | |
| Ab186 | 430 | QVQLVQSGAEVKKPGASVKVSCKASGFNIKDYYMH | SAD10318_P02_B06 | HC amino acid sequence |
| | | WVRQAPGQRLEWMGWIDLENANTIYDAKFQGRVTI | (ADI-57278) | |
| | | TRDTSASTAYMELSSLRSEDTAVYYCARDAYHRHFY | | |
| | | DVWGQGTLVTVSS | | |
| Ab186 | 431 | DIVMTQSPDSLAVSLGERATINCKSSQSLLNAHTGKN | SAD10318_P02_B06 | LC amino acid sequence |
| | | YLAWYQQKPGQPPKLLIYWASTRESGVPDRFSGSGS | (ADI-57278) | |
| | | GTDFTLTISSLQAEDVAVYYCKQSYHHRTFGGGTKV | | |
| | | EIK | | |
| Ab187 | 432 | QVQLVQSGAEVKKPGASVKVSCKASGFNIKDYYMH | SAD10318_P02_D06 | HC amino acid sequence |
| | | WVRQAPGQRLEWMGWIDLENANTIYDAKFQGRVTI | (ADI-57279) | |
| | | TRDTSASTAYMELSSLRSEDTAVYYCARDAHGRYFY | | |
| | | DVWGQGTLVTVSS | | |
| Ab187 | 433 | DIVMTQSPDSLAVSLGERATINCKSSQSLLNARTGHN | SAD10318_P02_D06 | LC amino acid sequence |
| | | HLAWYQQKPGQPPKLLIYWASTRESGVPDRFSGSGS | (ADI-57279) | |
| | | GTDFTLTISSLQAEDVAVYYCKQSYSRRTFGGGTKVE | | |
| | | IK | | |
| Ab188 | 434 | QVQLVQSGAEVKKPGASVKVSCKASGFNIKDYYMH | SAD10318_P02_E06 | HC amino acid sequence |
| | | WVRQAPGQRLEWMGWIDLENANTIYDAKFQGRVTI | (ADI-57280) | |
| | | TRDTSASTAYMELSSLRSEDTAVYYCARDAHHRYFY | | |
| | | DVWGQGTLVTVSS | | |
| Ab188 | 435 | DIVMTQSPDSLAVSLGERATINCKSSQSLLNARTHKN | SAD10318_P02_E06 | LC amino acid sequence |
| | | HLAWYQQKPGQPPKLLIYWASTRESGVPDRFSGSGS | (ADI-57280) | |
| | | GTDFTLTISSLQAEDVAVYYCKQSHSHRTFGGGTKVE | | |
| | | IK | | |
| Ab189 | 436 | QVQLVQSGAEVKKPGASVKVSCKASGFNIKDYYMH | SAD10318_P02_G06 | HC amino acid sequence |
| | | WVRQAPGQRLEWMGWIDLENANTIYDAKFQGRVTI | (ADI-48600) | |
| | | TRDTSASTAYMELSSLRSEDTAVYYCAHDAYGHYFY | | |
| | | DVWGQGTLVTVSS | | |
| Ab189 | 437 | DIVMTQSPDSLAVSLGERATINCKSSQSLLHTRTGKN | SAD10318_P02_G06 | LC amino acid sequence |
| | | YLAWYQQKPGQPPKLLIYWASTRESGVPDRFSGSGS | (ADI-48600) | |
| | | GTDFTLTISSLQAEDVAVYYCKQSYSRRTFGGGTKVE | | |
| | | IK | | |
| Ab190 | 438 | QVQLVQSGAEVKKPGASVKVSCKASGFNIKDYYMH | SAD10318_P03_B07 | HC amino acid sequence |
| | | WVRQAPGQRLEWMGWIDLENANTIYDAKFQGRVTI | (ADI-57281) | |
| | | TRDTSASTAYMELSSLRSEDTAVYYCARDHYGRYFY | | |
| | | DHWGQGTLVTVSS | | |
| Ab190 | 439 | DIVMTQSPDSLAVSLGERATINCKSSQSLLNAHTGKN | SAD10318_P03_B07 | LC amino acid sequence |
| | | HLAWYQQKPGQPPKLLIYWASTRESGVPDRFSGSGS | (ADI-57281) | |
| | | GTDFTLTISSLQAEDVAVYYCKQSHHRRTFGGGTKV | | |
| | | EIK | | |
| Ab191 | 440 | QVQLVQSGAEVKKPGASVKVSCKASGFNIKDYYMH | SAD10318_P03_E07 | HC amino acid sequence |
| | | WVRQAPGQRLEWMGWIDLENANTIYDAKFQGRVTI | (ADI-48601) | |
| | | TRDTSASTAYMELSSLRSEDTAVYYCARDHYHRYFY | | |
| | | DVWGQGTLVTVSS | | |
| Ab191 | 441 | DIVMTQSPDSLAVSLGERATINCKSSQSLLNAHTGKN | SAD10318_P03_E07 | LC amino acid sequence |
| | | YLAWYQQKPGQPPKLLIYWASTRESGVPDRFSGSGS | (ADI-48601) | |
| | | GTDFTLTISSLQAEDVAVYYCHQSHSRRTFGGGTKVE | | |
| | | IK | | |
| Ab192 | 442 | QVQLVQSGAEVKKPGASVKVSCKASGFNIKDYYMH | SAD10318_P03_F07 | HC amino acid sequence |
| | | WVRQAPGQRLEWMGWIDLENANTIYDAKFQGRVTI | (ADI-48602) | |
| | | TRDTSASTAYMELSSLRSEDTAVYYCARDAHGRYHY | | |
| | | DVWGQGTLVTVSS | | |
| Ab192 | 443 | DIVMTQSPDCLAVSLGERATINCKSSQSLLNARTGHN | SAD10318_P03_F07 | LC amino acid sequence |
| | | YLAWYQQKPGQPPKLLIYWASTRESGVPDRFSGSGS | (ADI-48602) | |
| | | GTDFTLTISSLQAEDVAVYYCKQSHSHRTFGGGTKVE | | |
| | | IK | | |
| Ab193 | 444 | QVQLVQSGAEVKKPGASVKVSCKASGFNIKDYYMH | SAD10318_P01_E01 | HC amino acid sequence |
| | | WVRQAPGQRLEWMGWIDLENANTIYDAKFQGRVTI | (ADI-48577) | |
| | | TRDTSASTAYMELSSLRSEDTAVYYCARDAHHRYFY | | |
| | | DVWGQGTLVTVSS | | |
| Ab193 | 445 | DIVMTQSPDSLAVSLGERATINCKSSQSLLNAHEGKN | SAD10318_P01_E01 | LC amino acid sequence |
| | | YLAWYQQKPGQPPKLLIYWASTRESGVPDRFSGSGS | (ADI-48577) | |
| | | GTDFTLTISSLQAEDVAVYYCKQSHSHRTFGGGTKVE | | |
| | | IK | | |
| Ab194 | 446 | QVQLVQSGAEVKKPGASVKVSCKASGFNIKDYYMH | SAD10318_P03_G07 | HC amino acid sequence |
| | | WVRQAPGQRLEWMGWIDLENANTIYDAKFQGRVTI | (ADI-57282) | |
| | | TRDTSASTAYMELSSLRSEDTAVYYCARDAYGRYHY | | |
| | | DHWGQGTLVTVS | | |
| Ab194 | 447 | DIVMTQSPDSLAVSLGERATINCKSSQSLLHAHTGKN | SAD10318_P03_G07 | LC amino acid sequence |
| | | YLAWYQQKPGQPPKLLIYWASTRESGVPDRFSGSGS | (ADI-57282) | |
| | | GTDFTLTISSLQAEDVAVYYCKQSYHHRTFGGGTKV | | |
| | | EIK | | |
| Ab195 | 448 | QVQLVQSGAEVKKPGASVKVSCKASGFNIKDYYMH | SAD10318_P03_A08 | HC amino acid sequence |
| | | WVRQAPGQRLEWMGWIDLENANTIYDAKFQGRVTI | (ADI-57283) | |
| | | TRDTSASTAYMELSSLRSEDTAVYYCARDAYGRYHY | | |
| | | DHWGQGTLVTVSS | | |
| Ab195 | 449 | DIVMTQSPDSLAVSLGERATINCKSSQSLLNARTGHN | SAD10318_P03_A08 | LC amino acid sequence |
| | | HLAWYQQKPGQPPKLLIYWASTRESGVPDRFSGSGS | (ADI-57283) | |
| | | GTDFTLTISSLQAEDVAVYYCKQSYSRRTFGGGTKVE | | |
| | | IK | | |
| Ab196 | 450 | QVQLVQSGAEVKKPGASVKVSCKASGFNIKDYYMH | SAD10318_P03_B08 | HC amino acid sequence |
| | | WVRQAPGQRLEWMGWIDLENANTIYDAKFQGRVTI | 9ADI-57284) | |
| | | TRDTSASTAYMELSSLRSEDTAVYYCARDHYHRYFY | | |
| | | DVWGQGTLVTVSS | | |
| Ab196 | 451 | DIVMTQSPDSLAVSLGERATINCKSSQSLLNAHTGHN | SAD10318_P03_B08 | LC amino acid sequence |
| | | YLAWYQQKPGQPPKLLIYWASTRESGVPDRFSGSGS | (ADI-57284) | |
| | | GTDFTLTISSLQAEDVAVYYCHQSYSHRTFGGGTKVE | | |
| | | IK | | |
| Ab197 | 452 | QVQLVQSGAEVKKPGASVKVSCKASGFNIKDYYMH | SAD10318_P03_C08 | HC amino acid sequence |
| | | WVRQAPGQRLEWMGWIDLENANTIYDAKFQGRVTI | (ADI-48603) | |
| | | TRDTSASTAYMELSSLRSEDTAVYYCARDHYGHYFY | | |
| | | DVWGQGTLVTVSS | | |
| Ab197 | 453 | DIVMTQSPDSLAVSLGERATINCKSSQSLLHARTGKN | SAD10318_P03_C08 | LC amino acid sequence |
| | | HLAWYQQKPGQPPKLLIYWASTRESGVPDRFSGSGS | (ADI-48603) | |
| | | GTDFTLTISSLQAEDVAVYYCKQSHSHRTFGGGTKVE | | |
| | | IK | | |
| Ab198 | 454 | QVQLVQSGAEVKKPGASVKVSCKASGFNIKDYYMH | SAD10318_P03_D08 | HC amino acid sequence |
| | | WVRQAPGQRLEWMGWIDLENANTIYDAKFQGRVTI | (ADI-48604) | |
| | | TRDTAASTAYMELSSLRSEDTAVYYCARDHYHRYFY | | |
| | | DHWGQGTLVTVSS | | |
| Ab198 | 455 | DIVMTQSPDSLAVSLGERATINCKSSQSLLNAHTGKN | SAD10318_P03_D08 | LC amino acid sequence |
| | | HLAWYQQKPGQPPKLLIYWASTRESGVPDRFSGSGS | (ADI-48604) | |
| | | GTDFTLTISSLQAEDVAVYYCKQSYSRRTFGGGTKVE | | |
| | | IK | | |
| Ab199 | 456 | QVQLVQSGAEVKKPGASVKVSCKASGFNIKDYYMH | SAD10318_P03_E08 | HC amino acid sequence |
| | | WVRQAPGQRLEWMGWIDLENANTIYDAKFQGRVTI | (ADI-48605) | |
| | | TRDTSASTAYMELSSLRSEDTAVYYCARDHYHRYFY | | |
| | | DVWGQGTLVTVSS | | |
| Ab199 | 457 | DIVMTQSPDSLAVSLGERATINCKSSQSLLNAHTGKN | SAD10318_P03_E08 | LC amino acid sequence |
| | | HLAWYQQKPGQPPKLLIYWASTRESGVPDRFSGSGS | (ADI-48605) | |
| | | GTDFTLTISSLQAEDVAVYYCKQSYHRRHFGGGTKV | | |
| | | EIK | | |
| Ab200 | 458 | QVQLVQSGAEVKKPGASVKVSCKASGFNIKDYYMH | SAD10318_P03_F08 | HC amino acid sequence |
| | | WVRQAPGQRLEWMGWIDLENANTIYDAKFQGRVTI | (ADI-48606) | |
| | | TRDTSASTAYMELSSLRSEDTAVYYCARDHYHRYFY | | |
| | | DVWGQGTLVTVSS | | |
| Ab200 | 459 | DIVMTQSPDSLAVSLGERATINCKSSQSLLNAHTGKN | SAD10318_P03_F08 | LC amino acid sequence |
| | | HLAWYQQKPGQPPKLLIYWASTRESGVPDRFSGSGS | (ADI-48606) | |
| | | GTDFTLTISSLQAEDVAVYYCKQSYSRRHFGGGTKV | | |
| | | EIK | | |
| Ab201 | 460 | QVQLVQSGAEVKKPGASVKVSCKASGFNIKDYYMH | SAD10318_P03_G08 | HC amino acid sequence |
| | | WVRQAPGQRLEWMGWIDLENANTIYDAKFQGRVTI | (ADI-57285) | |
| | | TRDTSASTAYMELSSLRSEDTAVYYCARDHYHRYFY | | |
| | | DVWGQGTLVTVSS | | |
| Ab201 | 461 | DIVMTQSPDSLAVSLGERATINCKSSQSLLHARTGKN | SAD10318_P03_G08 | LC amino acid sequence |
| | | HLAWYQQKPGQPPKLLIYWASTRESGVPDRFSGSGS | (ADI-57285) | |
| | | GTDFTLTISSLQAEDVAVYYCKQSHSHRTFGGGTKVE | | |
| | | IK | | |
| Ab202 | 462 | QVQLVQSGAEVKKPGASVKVSCKASGFNIKDYYMH | SAD10318_P03_H08 | HC amino acid sequence |
| | | WVRQAPGQRLEWMGWIDLENANTIYDAKFQGRVTI | (ADI-48607) | |
| | | TRDTSASTAYMELSSLRSEDTAVYYCARDAYHHYFY | | |
| | | DVWGQGTLVTVSS | | |
| Ab202 | 463 | DIVMTQSPDSLAVSLGERATINCKSSQSLLNARTGHN | SAD10318_P03_H08 | LC amino acid sequence |
| | | HLAWYQQKPGQPPKLLIYWASTRESGVPDRFSGSGS | (ADI-48607) | |
| | | GTDFTLTISSLQAEDVAVYYCHQSHSRRTFGGGTKVE | | |
| | | IK | | |
| Ab203 | 464 | QVQLVQSGAEVKKPGASVKVSCKASGFNIKDYYMH | SAD10318_P03_A09 | HC amino acid sequence |
| | | WVRQAPGQRLEWMGWIDLENANTIYDAKFQGRVTI | (ADI-48608) | |
| | | TRDTSASTAYMELSSLRSEDTAVYYCARDHYGRYFY | | |
| | | DHWGQGTLVTVSS | | |
| Ab203 | 465 | DIVMTQSPDSLAVSLGERATINCKSSQSLLNARTGHN | SAD10318_P03_A09 | LC amino acid sequence |
| | | HLAWYQQKPGQPPKLLIYWASTRESGVPDRFSGSGS | (ADI-48608) | |
| | | GTDFTLTISSLQAEDVAVYYCKQSYHHRTFGGGTKV | | |
| | | EIK | | |
| Ab204 | 466 | QVQLVQSGAEVKKPGASVKVSCKASGFNIKDYYMH | SAD10318_P01_F01 | HC amino acid sequence |
| | | WVRQAPGQRLEWMGWIDLENANTIYDAKFQGRVTI | (ADI-48578) | |
| | | TRDTSASTAYMELSSLRSEDTAVYYCARDAYGHYFY | | |
| | | DHWGQGTLVTVSS | | |
| Ab204 | 467 | DIVMTQSPDSLAVSLGERATINCKSSQSLLNAHTGKN | SAD10318_P01_F01 | LC amino acid sequence |
| | | HLAWYQQKPGQPPKLLIYWASTRESGVPDRFSGSGS | (ADI-48578) | |
| | | GTDFTLTISSLQAEDVAVYYCKQSYHHRTFGGGTKV | | |
| | | EIK | | |
| Ab205 | 468 | QVQLVQSGAEVKKPGASVKVSCKASGFNIKDYYMH | SAD10318_P03_C09 | HC amino acid sequence |
| | | WVRQAPGQRLEWMGWIDLENANTIYDAKFQGRVTI | (ADI-48609) | |
| | | TRDTSASTAYMELSSLRSEDTAVYYCARDAYHRYFY | | |
| | | DHWGQGTLVTVSS | | |
| Ab205 | 469 | DIVMTQSPDSLAVSLGERATINCKSSQSLLNAHTGKN | SAD10318_P03_C09 | LC amino acid sequence |
| | | HLAWYQQKPGQPPKLLIYWASTRESGVPDRFSGSGS | (ADI-48609) | |
| | | GTDFTLTISSLQAEDVAVYYCKQSYHHRTFGGGTKV | | |
| | | EIK | | |
| Ab206 | 470 | QVQLVQSGAEVKKPGASVKVSCKASGFNIKDYHMH | SAD10318_P03_D09 | HC amino acid sequence |
| | | WVRQAPGQRLEWMGWIDLENANTIYDAKFQGRVTI | (ADI-48610) | |
| | | TRDTSASTAYMELSSLRSEDTAVYYCARDAHHRYFY | | |
| | | DVWGQGTLVTVSS | | |
| Ab206 | 471 | DIVMTQSPDSLAVSLGERATINCKSSQSLLNAHTGKN | SAD10318_P03_D09 | LC amino acid sequence |
| | | HLAWYQQKPGQPPKLLIYWASTRESGVPDRFSGSGS | (ADI-48610) | |
| | | GTDFTLTISSLQAEDVAVYYCKQSHSHRTFGGGTKVE | | |
| | | IK | | |
| Ab207 | 472 | QVQLVQSGAEVKKPGASVKVSCKASGFNIKDYYMH | SAD10318_P03_E09 | HC amino acid sequence |
| | | WVRQAPGQRLEWMGWIDLENANTIYDAKFQGRVTI | (ADI-48611) | |
| | | TRDTSASTAYMELSSLRSEDTAVYYCARDAYGHYHY | | |
| | | DVWGQGTLVTVS | | |
| Ab207 | 473 | DIVMTQSPDSLAVSLGERATINCKSSQSLLNARTGHN | SAD10318_P03_E09 | LC amino acid sequence |
| | | HLAWYQQKPGQPPKLLIYWASTRESGVPDRFSGSGS | (ADI-48611) | |
| | | GTDFTLTISSLQAEDVAVYYCKQSYHHRTFGGGTKV | | |
| | | EIK | | |
| Ab208 | 474 | QVQLVQSGAEVKKPGASVKVSCKASGFNIKDYYMH | SAD10318_P03_F09 | HC amino acid sequence |
| | | WVRQAPGQRLEWMGWIDLENANTIYDAKFQGRVTI | (ADI-57286) | |
| | | TRDTSASTAYMELSSLRSEDTAVYYCARDAYGHYHY | | |
| | | DVWGQGTLVTVSS | | |
| Ab208 | 475 | DIVMTQSPDSLAVSLGERATINCKSSQSLLNAHPGKN | SAD10318_P03_F09 | LC amino acid sequence |
| | | YLAWYQQKPGQPPKLLIYWASTRESGVPDRFSGSGS | (ADI-57286) | |
| | | GTDFTLTISSLQAEDVAVYYCHQSYHRRTFGGGTKV | | |
| | | EIK | | |
| Ab209 | 476 | QVQLVQSGAEVKKPGASVKVSCKASGFNIKDYYMH | SAD10318_P03_G09 | HC amino acid sequence |
| | | WVRQAPGQRLEWMGWIDLENANTIYDAKFQGRVTI | (ADI-57287) | |
| | | TRDTSASTAYMELSSLRSEDTAVYYCARDHYGHYFY | | |
| | | DVWGQGTLVTVSS | | |
| Ab209 | 477 | DIVMTQSPDSLAVSLGERATINCKSSQSLLNAHTGHN | SAD10318_P03_G09 | LC amino acid sequence |
| | | YLAWYQQKPGQPPKLLIYWASTRESGVPDRFSGSGS | (ADI-57287) | |
| | | GTDFTLTISSLQAEDVAVYYCHQSYSHRTFGGGTKVE | | |
| | | IK | | |
| Ab210 | 478 | QVQLVQSGAEVKKPGASVKVSCKASGFNIKDYYMH | SAD10318_P04_C10 | HC amino acid sequence |
| | | WVRQAPGQRLEWMGWIDLENANTIYDAKFQGRVTI | (ADI-48612) | |
| | | TRDTSASTAYMELSSLRSEDTAVYYCARDAYGRYHH | | |
| | | DVWGQGTLVTVSS | | |
| Ab210 | 479 | DIVMTQSPDSLAVSLGERATINCKSSQSLLNARTGHN | SAD10318_P04_C10 | LC amino acid sequence |
| | | HLAWYQQKPGQPPKLLIYWASTRESGVPDRFSGSGS | (ADI-48612) | |
| | | GTDFTLTISSLQAEDVAVYYCHQSYHRRTFGGGTKV | | |
| | | EIK | | |
| Ab211 | 480 | QVQLVQSGAEVKKPGASVKVSCKASGFNIKDYYMH | SAD10318_P04_D10 | HC amino acid sequence |
| | | WVRQAPGQRLEWMGWIDLENANTIYDAKFQGRVTI | (ADI-48613) | |
| | | TRDTSASTAYMELSSLRSEDTAVYYCARDAYGHYHY | | |
| | | DVWGQGTLVTVSS | | |
| Ab211 | 481 | DIVMTQSPDSLAVSLGERATINCKSSQSLLHARTGKN | SAD10318_P04_D10 | LC amino acid sequence |
| | | HLAWYQQKPGQPPKLLIYWASTRESGVPDRFSGSGS | (ADI-48613) | |
| | | GTDFTLTISSLQAEDVAVYYCKQSYSRRTFGGGTKVE | | |
| | | IK | | |
| Ab212 | 482 | QVQLVQSGAEVKKPGASVKVSCKASGFNIKDYYMH | SAD10318_P04_E10 | HC amino acid sequence |
| | | WVRQAPGQRLEWMGWIDLENANTIYDAKFQGRVTI | (ADI-57288) | |
| | | TRDTSASTAYMELSSLRSEDTAVYYCARDAYGRYHY | | |
| | | DHWGQGTLVTVSS | | |
| Ab212 | 483 | DIVMTQSPDSLAVSLGERATINCKSSQSLLNARTGHN | SAD10318_P04_E10 | LC amino acid sequence |
| | | YLAWYQQKPGQPPKLLISGSTRESGVPDRFSGSGS | (ADI-57288) | |
| | | GTDFTLTISSLQAEDVAVYYCHQSYHRRTFGGGTKVE | | |
| | | IK | | |
| Ab213 | 484 | QVQLVQSGAEVKKPGASVKVSCKASGFNIKDYYMH | SAD10318_P04_F10 | HC amino acid sequence |
| | | WVRQAPGQRLEWMGWIDLENANTIYDAKFQGRVTI | (ADI-57289) | |
| | | TRDTSASTAYMELSSLRSEDTAVYYCARDAYHRYHY | | |
| | | DVWGQGTLVTVSS | | |
| Ab213 | 485 | DIVMTQSPDSLAVSLGERATINCKSSQSLLNARTHKN | SAD10318_P04_F10 | LC amino acid sequence |
| | | HLAWYQQKPGQPPKLLIYWASTRESGVPDRFSGSGS | (ADI-57289) | |
| | | GTDFTLTISSLQAEDVAVYYCKQSYSRRTFGGGTKVE | | |
| | | IK | | |
| Ab214 | 486 | QVQLVQSGAEVKKPGASVKVSCKASGFNIKDYYMH | SAD10318_P04_H10 | HC amino acid sequence |
| | | WVRQAPGQRLEWMGWIDLENANTIYDAKFQGRVTI | (ADI-57290) | |
| | | TRDTSASTAYMELSSLRSEDTAVYYCARDHYGHYFY | | |
| | | DVWGQGTLVTVSS | | |
| Ab214 | 487 | DIVMTQSPDSLAVSLGERATINCKSSQSLLNAHTGKN | SAD10318_P04_H10 | LC amino acid sequence |
| | | HLAWYQQKPGQPPKLLIYWASTRESGVPDRFSGSGS | (ADI-57290) | |
| | | GTDFTLTISSLQAEDVAVYYCKQSYSRRTFGGGTKVE | | |
| | | IK | | |
| Ab215 | 488 | QVQLVQSGAEVKKPGASVKVSCKASGFNIKDYYMH | SAD10318_P01_G01 | HC amino acid sequence |
| | | WVRQAPGQRLEWMGWIDLENANTIYDAKFQGRVTI | (ADI-48579) | |
| | | TRDTSASTAYMELSSLRSEDTAVYYCARDAHGHYFY | | |
| | | DVWGQGTLVTVSS | | |
| Ab215 | 489 | DIVMTQSPDSLAVSLGERATINCKSSQSLLHAHTGKN | SAD10318_P01_G01 | LC amino acid sequence |
| | | YLAWYQQKPGQPPKLLIYWASTRESGVPDRFSGSGS | (ADI-48579) | |
| | | GTDFTLTISSLQAEDVAVYYCKQSHSHRTFGGGTKVE | | |
| | | IK | | |
| Ab216 | 490 | QVQLVQSGAEVKKPGASVKVSCKASGFNIKDYYMH | SAD10318_P04_A11 | HC amino acid sequence |
| | | WVRQAPGQRLEWMGWIDLENANTIYDAKFQGRVTI | (ADI-57291) | |
| | | TRDTSASTAYMELSSLRSEDTAVYYCARDHYGRHFY | | |
| | | DVWGQGTLVTVSS | | |
| Ab216 | 491 | DIVMTQSPDSLAVSLGERATINCKSSQSLLNARTGHN | SAD10318_P04_A11 | LC amino acid sequence |
| | | HLAWYQQKPGQPPKLLIYWASTRESGVPDRFSGSGS | (ADI-57291) | |
| | | GTDFTLTISSLQAEDVAVYYCKQSHHRRTFGGGTKV | | |
| | | EIK | | |
| Ab217 | 492 | QVQLVQSGAEVKKPGASVKVSCKASGFNIKDYYMH | SAD10318_P04_B11 | HC amino acid sequence |
| | | WVRQAPGQRLEWMGWIDLENANTIYDAKFQGRVTI | (ADI-48614) | |
| | | TRDTSASTAYMELSSLRSEDTAVYYCARDHYHRYFY | | |
| | | DVWGQGTLVTVSS | | |
| Ab217 | 493 | DIVMTQSPDSLAVSLGERATFNCKSSQSLLNAHTGKN | SAD10318_P04_B11 | LC amino acid sequence |
| | | HLAWYQQKPGQPPKLLIYWASTRESGVPDRFSGSGS | (ADI-48614) | |
| | | GTDFTLTISSLQAEDVAVYYCKQSYSRRTFGGGTKVE | | |
| | | IK | | |
| Ab218 | 494 | QVQLVQSGAEVKKPGASVKVSCKASGFNIKDYYMH | SAD10318_P04_C11 | HC amino acid sequence |
| | | WVRQAPGQRLEWMGWIDLENANTIYDAKFQGRVTI | (ADI-48615) | |
| | | TRDTSASTAYMELSSLRSEDTAVYYCARDHHGRYFY | | |
| | | DVWGQGTLVTVSS | | |
| Ab218 | 495 | DIVMTQSPDSLAVSLGERATINCKSSQSLLNARTGHN | SAD10318_P04_C11 | LC amino acid sequence |
| | | HLAWYQQKPGQPPKLLIYWASTRESGVPDRFSGSGS | (ADI-48615) | |
| | | GTDFTLTISSLQAEDVAVYYCKQSYSRRTFGGGTKVE | | |
| | | IK | | |
| Ab219 | 496 | QVQLVQSGAEVKKPGASVKVSCKASGFNIKDYYMH | SAD10318_P04_D11 | HC amino acid sequence |
| | | WVRQAPGQRLEWMGWIDLENANTIYDAKFQGRVTI | (ADI-48616) | |
| | | TRDTSASTAYMELSSLRSEDTAVYYCARDAYGHYFY | | |
| | | DVWGQGTLVTVSS | | |
| Ab219 | 497 | DIVMTQSPDSLAVSLGERATINCKSSQSLLNARTGHN | SAD10318_P04_D11 | LC amino acid sequence |
| | | HLAWYQQKPGQPPKLLIYWASTRESGVPDRFSGSGS | (ADI-48616) | |
| | | GTDFTLTISSLQAEDVAVYYCHQSYSHRTFGGGTKVE | | |
| | | IK | | |
| Ab220 | 498 | QVQLVQSGAEVKKPGASVKVSCKASGFNIKDYYMH | SAD10318_P04_E11 | HC amino acid sequence |
| | | WVRQAPGQRLEWMGWIDLENANTIYDAKFQGRVTI | (ADI-57292) | |
| | | TRDTSASTAYMELSSLRSEDTAVYYCARDAYGHYFY | | |
| | | DHWGQGTLVTVSS | | |
| Ab220 | 499 | DIVMTQSPDSLAVSLGERATINCKSSQSLLNARTGHN | SAD10318_P04_E11 | LC amino acid sequence |
| | | HLAWYQQKPGQPPKLLIYWASTRESGVPDRFSGSGS | (ADI-57292) | |
| | | GTDFTLTISSLQAEDVAVYYCHQSYSHRTFGGGTKVE | | |
| | | IK | | |
| Ab221 | 500 | QVQLVQSGAEVKKPGASVKVSCKASGFNTKDYYMH | SAD10318_P04_F11 | HC amino acid sequence |
| | | WVRQAPGQRLEWMGWIDLENANTIYDAKFQGRVTI | (ADI-57293) | |
| | | TRDTSASTAYMELSSLRSEDTAVYYCARDAHGRYHY | | |
| | | DVWGQGTLVTVSS | | |
| Ab221 | 501 | DIVMTQSPDSLAVSLGERATINCKSSQSLLNARTGHN | SAD10318_P04_F11 | LC amino acid sequence |
| | | HLAWYQQKPGQPPKLLIYWASTRESGVPDRFSGSGS | (ADI-57293) | |
| | | GTDFTLTISSLQAEDVAVYYCKQSYSRRTFGGGTKVE | | |
| | | IK | | |
| Ab222 | 502 | QVQLVQSGAEVKKPGASVKVSCKASGFNIKDYYMH | SAD10318_P04_G11 | HC amino acid sequence |
| | | WVRQAPGQRLEWMGWIDLENANTIYDAKFQGRVTI | (ADI-57294) | |
| | | TRDASASTAYMELSSLRSEDTAVYYCARDAYHRYH | | |
| | | YDVWGQGTLVTVSS | | |
| Ab222 | 503 | DIVMTQSPDSLAVSLGERATINCKSSQSLLNAHTGKN | SAD10318_P04_G11 | LC amino acid sequence |
| | | HLAWYQQKPGQPPKLLIYWASTRESGVPDRFSGSGS | (ADI-57294) | |
| | | GTDFTLTISSLQAEDVAVYYCKQSHSRRTFGGGTKVE | | |
| | | IK | | |
| Ab223 | 504 | QVQLVQSGAEVKKPGASVKVSCKASGFNIKDYYMH | SAD10318_P04_H11 | HC amino acid sequence |
| | | WVRQAPGQRLEWMGWIDLENANTIYDAKFQGRVTI | (ADI-48617) | |
| | | TRDTSASTAYMELSSLRSEDTAVYYCARDHYGRYFY | | |
| | | DHWGQGTLVTVSS | | |
| Ab223 | 505 | DIVMTQYPDSLAVSLGERATINCKSSQSLLNAHTGHN | SAD10318_P04_H11 | LC amino acid sequence |
| | | YLAWYQQKPGQPPKLLIYWASTRESGVPDRFSGSGS | (ADI-48617) | |
| | | GTDFTLTISSLQAEDVAVYYCHQSYSHRTFGGGTKVE | | |
| | | IK | | |
| Ab224 | 506 | QVQLVQSGAEVKKPGASVKVSCKASGFNIKDYYMH | SAD10318_P04_A12 | HC amino acid sequence |
| | | WVRQAPGQRLEWMGWIDLENANTIYDAKFQGRVTI | (ADI-48618) | |
| | | TRDTSASTAYMELSSLRSEDTAVYYCARDAYHRHFY | | |
| | | DVWGQGTLVTVSS | | |
| Ab224 | 507 | DIVMTQSPDSLAVSLGERATINCKSSQSLLHPRTGKN | SAD10318_P04_A12 | LC amino acid sequence |
| | | YLAWYQQKPGQPPKLLIYWASTRESGVPDRFSGSGS | (ADI-48618) | |
| | | GTDFTLTISSLQAEDVAVYYCKQSYHHRTFGGGTKV | | |
| | | EIK | | |
| Ab225 | 508 | QVQLVQSGAEVKKPGASVKVSCKASGFNIKDYYMH | SAD10318_P04_F12 | HC amino acid sequence |
| | | WVRQAPGQRLEWMGWIDLENANTIYDAKFQGRVTI | (ADI-57295) | |
| | | TRDTSASTAYMELSSLRSEDTAVYYCARDHHGRYFY | | |
| | | DVWGQGTLVTVSS | | |
| Ab225 | 509 | DIVMTQSPDSLAVSLGERATINCKSSQSLLHARTGHN | SAD10318_P04_F12 | LC amino acid sequence |
| | | YLAWYQQKPGQPPKLLIYWASTRESGVPDRFSGSGS | (ADI-57295) | |
| | | GTDFTLTISSLQAEDVAVYYCKQSHSHRTFGGGTKVE | | |
| | | IK | | |
| Ab226 | 510 | QVQLVQSGAEVKKPGASVKVSCKASGFNIKDYYMH | SAD10318_P01_H01 | HC amino acid sequence |
| | | WVRQAPGQRLEWMGWIDLENANTIYDAKFQGRVTI | (ADI-48580) | |
| | | TRDTSASTAYMELSSLRSEDTAVYYCARDAHHRYFY | | |
| | | DVWGQGTLVTVSS | | |
| Ab226 | 511 | DIVMTQSPDSLAVSLGERATINCKSSQSLLNAHTGKN | SAD10318_P01_H01 | LC amino acid sequence |
| | | HLAWYQQKPGQPPKLLIYWASTRESGVPDRFSGSGS | (ADI-48580) | |
| | | GTDFTLTISSLQAEDVAVYYCKQSYHHRTFGGGTKV | | |
| | | EIK | | |
| Ab227 | 512 | QVQLVQSGAEVKKPGASVKVSCKASGFNIKDYYMH | SAD10318_P04_G12 | HC amino acid sequence |
| | | WVRQAPGQRLEWMGWIDLENANTIYDAKFQGRVTI | (ADI-57296) | |
| | | TRDTSASTAYMELSSLRSEDTAVYYCARDAYGHYHY | | |
| | | DVWGQGTLVTVSS | | |
| Ab227 | 513 | DIVMTQSPDSLAVSLGERATINCKSSQSLLNAHTGKN | SAD10318_P04_G12 | LC amino acid sequence |
| | | HLAWYQQKPGQPPKLLIYWASTRESGVPDRFSGSGS | (ADI-57296) | |
| | | GTDFTLTISSLQAEDVAVYYCKQSYSRRTFGGGTKVE | | |
| | | IK | | |
| Ab228 | 514 | QVQLVQSGAEVKKPGASVKVSCKASGFNIKDYYMH | SAD10318_P04_H12 | HC amino acid sequence |
| | | WVRQAPGQRLEWMGWIDLENANTIYDAKFQGRVTI | (ADI-57297) | |
| | | TRDTSASTAYMELSSLRSEDTAVYYCARDAHGRYFH | | |
| | | DVWGQGTLVTVSS | | |
| Ab228 | 515 | DIVMTQSPDSLAVSLGERATINCKSSQSLLNAHTGKN | SAD10318_P04_H12 | LC amino acid sequence |
| | | HLAWYQQKPGQPPKLLIYWASTRESGVPDRFSGSGS | (ADI-57297) | |
| | | GTDFTLTISSLQAEDVAVYYCHQSYSHRTFGGGTKVE | | |
| | | IK | | |
| Ab229 | 516 | QVQLVQSGAEVKKPGASVKVSCKASGYTFASYAMH | SAD10319_P01_A01 | HC amino acid sequence |
| | | WVRQAPGQRLEWMGWINPDTGNTVYSQKFQGRVTI | (ADI-48619) | |
| | | TRDTSASTAYMELSSLRSEDTAVYYCARDAYHHYFY | | |
| | | DVWGQGTLVTVSS | | |
| Ab229 | 517 | DIVMTQSPDSLAVSLGERATINCKSSQSLLNARTGKN | SAD10319_P01_A01 | LC amino acid sequence |
| | | YLAWYQQKPGQPPKLLIYWASTRESGVPDRFSGSGS | (ADI-48619) | |
| | | GTDFTLTISSLQAEDVAVYYCKQSYSRRTFGGGTKVE | | |
| | | IK | | |
| Ab230 | 518 | QVQLVQSGAEVKKPGASVKVSCKASGYTFTDYDMH | SAD10319_P01_C01 | HC amino acid sequence |
| | | WVRQAPGQRLEWMGWIDAGTGLTKYSQKFQGRVTI | (ADI-48621 and | |
| | | TRDTSASTAYMELSSLRSEDTAVYYCARDHYGHYFY | ADI-48636) | |
| | | DVWGQGTLVTVSS | | |
| Ab230 | 519 | DIVMTQSPDSLAVSLGERATINCKSSQSLLNARTGKN | SAD10319_P01_C01 | LC amino acid sequence |
| | | YLAWYQQKPGQPPKLLIYWASTRESGVPDRFSGSGS | (ADI-48621 and | |
| | | GTDFTLTISSLQAEDVAVYYCKQSYSRRTFGGGTKVE | ADI-48636) | |
| | | IK | | |
| Ab231 | 520 | QVQLVQSGAEVKKPGASVKVSCKASGYTFKSYDMH | SAD10319_P01_D01 | HC amino acid sequence |
| | | WVRQAPGQRLEWMGWIDAGTGNTKYSQKFQGRVTI | (ADI-48622) | |
| | | TRDTSASTAYMELSSLRSEDTAVYYCARDAYGRYFY | | |
| | | DVWGQGTLVTVSS | | |
| Ab231 | 521 | DIVMTQSPDSLAVSLGERATINCKSSQSLLNARTGKN | SAD10319_P01_D01 | LC amino acid sequence |
| | | YLAWYQQKPGQPPKLLIYWASTRESGVPDRFSGSGS | (ADI-48622) | |
| | | GTDFTLTISSLQAEDVAVYYCKQSYSRRTFGGGTKVE | | |
| | | IK | | |
| Ab232 | 522 | QVQLVQSGAEVKKPGASVKVSCKASGYTFDAYAMH | SAD10319_P01_E01 | HC amino acid sequence |
| | | WVRQAPGQRLEWMGWIDAGTGATAYSQKFQGRVTI | (ADI-57298) | |
| | | TRDTSASTAYMELSSLRSEDTAVYYCARDHYGHYFY | | |
| | | DVWGQGTLVTVSS | | |
| Ab232 | 523 | DIVMTQSPDSLAVSLGERATINCKSSQSLLNARTGKN | SAD10319_P01_E01 | LC amino acid sequence |
| | | YLAWYQQKPGQPPKLLIYWASTRESGVPDRFSGSGS | (ADI-57298) | |
| | | GTDFTLTISSLQAEDVAVYYCKQSYSRRTFGGGTKVE | | |
| | | IK | | |
| Ab233 | 524 | QVQLVQSGAEVKKPGASVKVSCKASGYTFQSYDMH | SAD10319_P01_F01 | HC amino acid sequence |
| | | WVRQAPGQRLQWMGWINPTTGNTVYSQKFQGRVTI | (ADI-57299) | |
| | | TRDTSASTAYMELSSLRSEDTAVYYCARDAYGRYFY | | |
| | | DVWGQGTLVTVSS | | |
| Ab233 | 525 | DIVMTQSPDSLAVSLGERATINCKSSQSLLNARTGKN | SAD10319_P01_F01 | LC amino acid sequence |
| | | YLAWYQQKPGQPPKLLIYWASTRESGVPDRFSGSGS | (ADI-57299) | |
| | | GTDFTLTISSLQAEDVAVYYCKQSYSRRTFGGGTKVE | | |
| | | IK | | |
| Ab234 | 526 | QVQLVQSGAEVKKPGASVKVSCKASGYTFTSADMH | SAD10319_P01_G01 | HC amino acid sequence |
| | | WVRQAPGQRLQPMGWINAGTGATKYSQKFQGRVTI | (ADI-57300) | |
| | | TRDTSANTAYMELSSLRSEDTAVYYCARDAYGRYFY | | |
| | | DVWGQGTLVTVSS | | |
| Ab234 | 527 | DIVMTQSPDSLAVSLGERATINCKSSQSLLNARTGKN | SAD10319_P01_G01 | LC amino acid sequence |
| | | YLAWYQQKPGQPPKLLIYWASTRESGVPDRFSGSGS | (ADI-57300) | |
| | | GTDFTLTISSLQAEDVAVYYCKQSYSRRTFGGGTKVE | | |
| | | IK | | |
| Ab235 | 528 | QVQLVQSGAEVKKPGASVKVSCKASGYTFDDYAMH | SAD10319_P01_H01 | HC amino acid sequence |
| | | WVRQAPGQRLEWMGWIDAGTGDTKYSQKFQGRVTI | (ADI-48623) | |
| | | TRDTSASTAYMELSSLRSEDTAVYYCARDHYHRYFY | | |
| | | DVWGQGTLVTVSS | | |
| Ab235 | 529 | DIVMTQSPDSLAVSLGERATINCKSSQSLLNARTGKN | SAD10319_P01_H01 | LC amino acid sequence |
| | | YLAWYQQKPGQPPKLLIYWASTRESGVPDRFSGSGS | (ADI-48623) | |
| | | GTDFTLTISSLQAEDVAVYYCKQSYSRRTFGGGTKVE | | |
| | | IK | | |
| Ab236 | 530 | QVQLVQSGAEVKKPGASVKVSCKASGYTFTEYEMH | SAD10319_P01_A02 | HC amino acid sequence |
| | | WVRQAPGQRLEWMGWINPLTGNTKYSQKFQGRVTI | (ADI-57301) | |
| | | TRDTSASTAYMELSSLRSEDTAVYYCARDHYGHYFY | | |
| | | DVWGQGTLVTVSS | | |
| Ab236 | 531 | DIVMTQSPDSLAVSLGERATINCKSSQSLLNARTGKN | SAD10319_P01_A02 | LC amino acid sequence |
| | | YLAWYQQKPGQPPKLLIYWASTRESGVPDRFSGSGS | (ADI-57301) | |
| | | GTDFTLTISSLQAEDVAVYYCKQSYSRRTFGGGTKVE | | |
| | | IK | | |
| Ab237 | 532 | QVQLVQSGAEVKKPGASVKVSCKASGFNIKDYYMH | SAD10318_P01_A02 | HC amino acid sequence |
| | | WVRQAPGQRLEWMGWIDLENANTIYDAKFQGRVTI | (ADI-48581) | |
| | | TRDTSASTAYMELSSLRSEDTAVYYCARDAYHHYFY | | |
| | | DVWGQGTLVTVSS | | |
| Ab237 | 533 | DIVMTQSPDSLAVSLGERATINCKSSQSLLNARTHKN | SAD10318_P01_A02 | LC amino acid sequence |
| | | HLAWYQQKPGQPPKLLIYWASTRESGVPDRFSGSGS | (ADI-48581) | |
| | | GTDFTLTISSLQAEDVAVYYCKQSYHHRTFGGGTKV | | |
| | | EIK | | |
| Ab238 | 534 | QVQLVQSGAEVKKPGASVKVSCKASGYTFTEYNMH | SAD10319_P01_C02 | HC amino acid sequence |
| | | WVRQAPGQRLEWMGWINPLTGNTLYSQKFQGRVTI | (ADI-57302) | |
| | | TRDTSASTAYMELSSLRSEDTAVYYCARDAYHHYFY | | |
| | | DVWGQGTLVTVSS | | |
| Ab238 | 535 | DIVMTQSPDSLAVSLGERATINCKSSQSLLNARTGKN | SAD10319_P01_C02 | LC amino acid sequence |
| | | YLAWYQQKPGQPPKLLIYWASTRESGVPDRFSGSGS | (ADI-57302) | |
| | | GTDFTLTISSLQAEDVAVYYCKQSYSRRTFGGGTKVE | | |
| | | IK | | |
| Ab239 | 536 | QVQLVQSGAEVKKPGASVKVSCKASGYTFTEYDMH | SAD10319_P01_D02 | HC amino acid sequence |
| | | WVRQAPGQRPEWMGWIDAGTGATVYSQKFQGRVTI | (ADI-57303) | |
| | | TRDTSASTAYMELSSLRSEDTAVYYCARDAYGRYFY | | |
| | | DHWGQGTLVTVSS | | |
| Ab239 | 537 | DIVMTQSPDSLAVSLGERATINCKSSQSLLNARTGKN | SAD10319_P01_D02 | LC amino acid sequence |
| | | YLAWYQQKPGQPPKLLIYWASTRESGVPDRFSGSGS | (ADI-57303) | |
| | | GTDFTLTISSLQAEDVAVYYCKQSYSRRTFGGGTKVE | | |
| | | IK | | |
| Ab240 | 538 | QVQLVQSGAEVKKPGASVKVSCKASGYTFTSDFMH | SAD10319_P01_E02 | HC amino acid sequence |
| | | WVRQAPGQRLEWMGWINPATGATKYSQKFQGRVTI | (ADI-57304) | |
| | | TRDTSASTAYMELSSLRSEDTAVYYCARDAYGHYFY | | |
| | | DHWGQGTLVTVSS | | |
| Ab240 | 539 | DIVMTQSPDSLAVSLGERATINCKSSQSLLNARTGKN | SAD10319_P01_E02 | LC amino acid sequence |
| | | YLAWYQQKPGQPPKLLIYWASTRESGVPDRFSGSGS | (ADI-57304) | |
| | | GTDFTLTISSLQAEDVAVYYCKQSYSRRTFGGGTKVE | | |
| | | IK | | |
| Ab241 | 540 | QVQLVQSGAEVKKPGASVKVSCKASGYTFESYDMH | SAD10319_P01_F02 | HC amino acid sequence |
| | | WVRQAPGQRLEWMGWIDAGTGNTKYSQKFQGRVTI | (ADI-48624) | |
| | | TADESTSTAYMELSSLRSEDTAVYYCARDHYGHYFY | | |
| | | DVWGQGTLVTVSS | | |
| Ab241 | 541 | DIVMTQSPDSLAVSLGERATINCKSSQSLLNARTGKN | SAD10319_P01_F02 | LC amino acid sequence |
| | | YLAWYQQKPGQPPKLLIYWASTRESGVPDRFSGSGS | (ADI-48624) | |
| | | GTDFTLTISSLQAEDVAVYYCKQSYSRRTFGGGTKVE | | |
| | | IK | | |
| Ab242 | 542 | QVQLVQSGAEVKKPGASVKVSCKASGYTFTDYAMH | SAD10319_P01_H02 | HC amino acid sequence |
| | | WVRQAPGQRLEWMGWINPSTGATVYSQKFQGRVTI | (ADI-48625) | |
| | | TRDTSASTAYMELSSLRSEDTAVYYCARDAYHHYFY | | |
| | | DVWGQGTLVTVSS | | |
| Ab242 | 543 | DIVMTQSPDSLAVSLGERATINCKSSQSLLNARTGKN | SAD10319_P01_H02 | LC amino acid sequence |
| | | YLAWYQQKPGQPPKLLIYWASTRESGVPDRFSGSGS | (ADI-48625) | |
| | | GTDFTLTISSLQAEDVAVYYCKQSYSRRTFGGGTKVE | | |
| | | IK | | |
| Ab243 | 544 | QVQLVQSGAEVKKPGASVKVSCKASGYTFNAYAMH | SAD10319_P01_B03 | HC amino acid sequence |
| | | WVRQAPGQRLEWMGWINPDTGATTYSQKFQGRVTI | (ADI-57305) | |
| | | TRDTSASTAYMELSSLRSEDTAVYYCARDAYHHYFY | | |
| | | DVWGQGTLVTVSS | | |
| Ab243 | 545 | DIVMTQSPDSLAVSLGERATINCKSSQSLLNARTGKN | SAD10319_P01_B03 | LC amino acid sequence |
| | | YLAWYQQKPGQPPKLLIYWASTRESGVPDRFSGSGS | (ADI-57305) | |
| | | GTDFTLTISSLQAEDVAVYYCKQSYSRRTFGGGTKVE | | |
| | | IK | | |
| Ab244 | 546 | QVQLVQSGAEVKKPGASVKVSCKASGYTFTDYDMH | SAD10319_P01_C03 | HC amino acid sequence |
| | | WVRQAPGQRLEWMGWIDPYTGATKYSQKFQGRVTI | (ADI-48626) | |
| | | TRDTSASTAYMELSSLRSEDTAVYYCARDAYGHYFY | | |
| | | DVWGQGTLVTVSS | | |
| Ab244 | 547 | DIVMTQSPDSLAVSLGERATINCKSSQSLLNARTGKN | SAD10319_P01_C03 | LC amino acid sequence |
| | | YLAWYQQKPGQPPKLLIYWASTRESGVPDRFSGSGS | (ADI-48626) | |
| | | GTDFTLTISSLQAEDVAVYYCKQSYSRRTFGGGTKVE | | |
| | | IK | | |
| Ab245 | 548 | QVQLVQSGAEVKKPGASVKVSCKASGYTFTSYNMH | SAD10319_P01_D03 | HC amino acid sequence |
| | | WVRQAPGQRLEWMGWIDAGTGATHYSQKFQGRVTI | (ADI-57306) | |
| | | TRDTSASTAYMELSSLRSEDTAVYYCARDAYHHYFY | | |
| | | DVWGQGTLVTVSS | | |
| Ab245 | 549 | DIVMTQSPDSLAVSLGERATINCKSSQSLLNARTGKN | SAD10319_P01_D03 | LC amino acid sequence |
| | | YLAWYQQKPGQPPKLLIYWASTRESGVPDRFSGSGS | (ADI-57306) | |
| | | GTDFTLTISSLQAEDVAVYYCKQSYSRRTFGGGTKVE | | |
| | | IK | | |
| Ab246 | 550 | QVQLVQSGAEVKKPGASVKVSCKASGYTFESYDMH | SAD10319_P01_F03 | HC amino acid sequence |
| | | WVRQAPGQRLEWMGWINAGTGATVYSQKFQGRVTI | (ADI-48627) | |
| | | TRDTSASTAYMELSSLRSEDTAVYYCARDAYHHYFY | | |
| | | DVWGQGTLVTVSS | | |
| Ab246 | 551 | DIVMTQSPDSLAVSLGERATINCKSSQSLLNARTGKN | SAD10319_P01_F03 | LC amino acid sequence |
| | | YLAWYQQKPGQPPKLLIYWASTRESGVPDRFSGSGS | (ADI-48627) | |
| | | GTDFTLTISSLQAEDVAVYYCKQSYSRRTFGGGTKVE | | |
| | | IK | | |
| Ab247 | 552 | QVQLVQSGAEVKKPGASVKVSCKASGYTFDSYSMH | SAD10319_P02_A04 | HC amino acid sequence |
| | | WVRQAPGQRLEWMGWINPDTGATDYSQKFQGRVTI | (ADI-57307) | |
| | | TRDTSASTAYMELSSLRSEDTAVYYCARDHYGHYFY | | |
| | | DVWGQGTLVTVSS | | |
| Ab247 | 553 | DIVMTQSPDSLAVSLGERATINCKSSQSLLNARTGKN | SAD10319_P02_A04 | LC amino acid sequence |
| | | YLAWYQQKPGQPPKLLIYWASTRESGVPDRFSGSGS | (ADI-57307) | |
| | | GTDFTLTISSLQAEDVAVYYCKQSYSRRTFGGGTKVE | | |
| | | IK | | |
| Ab248 | 554 | QVQLVQSGAEVKKPGASVKVSCKASGFNIKDYYMH | SAD10318_P01_B02 | HC amino acid sequence |
| | | WVRQAPGQRLEWMGWIDLENANTIYDAKFQGRVTI | (ADI-48582) | |
| | | TRDTSASTAYMELSSLRSEDTAVYYCARDHYHRYFY | | |
| | | DVWGQGTLVTVSS | | |
| Ab248 | 555 | DIVMTQSPDSLAVSLGERATINCKSSQSLLNARTGHN | SAD10318_P01_B02 | LC amino acid sequence |
| | | HLAWYQQKPGQPPKLLIYWASTRESGVPDRFSGSGS | (ADI-48582) | |
| | | GTDFTLTISSLQAEDVAVYYCKQSHSHRTFGGGTKVE | | |
| | | IK | | |
| Ab249 | 556 | QVQLVQSGAEVKKPGASVKVSCKASGYTFADYAMH | SAD10319_P02_B04 | HC amino acid sequence |
| | | WVRQAPGQRLEWMGWINPGTGSTKYSQKFQGRVTI | (ADI-57308) | |
| | | TRDTSASTAYMELSSLRSEDTAVYYCARDAYGHYFY | | |
| | | DHWGQGTLVTVSS | | |
| Ab249 | 557 | DIVMTQSPDSLAVSLGERATINCKSSQSLLNARTGKN | SAD10319_P02_B04 | LC amino acid sequence |
| | | YLAWYQQKPGQPPKLLIYWASTRESGVPDRFSGSGS | (ADI-57308) | |
| | | GTDFTLTISSLQAEDVAVYYCKQSYSRRTFGGGTKVE | | |
| | | IK | | |
| Ab250 | 558 | QVQLVQSGAEVKKPGASVKVSCKASGYTFESYSMH | SAD10319_P02_C04 | HC amino acid sequence |
| | | WVRQAPGQRLEWMGWINPATGATDYSQKFQGRVTI | (ADI-57309) | |
| | | TRDTSASTAYMELSSLRSEDTAVYYCARDAYHHYFY | | |
| | | DVWGQGTLVTVSS | | |
| Ab250 | 559 | DIVMTQSPDSLAVSLGERATINCKSSQSLLNARTGKN | SAD10319_P02_C04 | LC amino acid sequence |
| | | YLAWYQQKPGQPPKLLIYWASTRESGVPDRFSGSGS | (ADI-57309) | |
| | | GTDFTLTISSLQAEDVAVYYCKQSYSRRTFGGGTKVE | | |
| | | IK | | |
| Ab251 | 560 | QVQLVQSGAEVKKPGASVKVSCKASGYTFTSYAMH | SAD10319_P02_D04 | HC amino acid sequence |
| | | WVRQAPGQRLQWMGWIDAGTGNTYYSQKFQGRVTI | (ADI-57310) | |
| | | TRDTSASTAYMELSSLRSEDTAVYYCARDAHGHYFY | | |
| | | DVWGQGTLVTVSS | | |
| Ab251 | 561 | DIVMTQSPDSLAVSLGERATINCKSSQSLLNARTGKN | SAD10319_P02_D04 | LC amino acid sequence |
| | | YLAWYQQKPGQPPKLLIYWASTRESGVPDRFSGSGS | (ADI-57310) | |
| | | GTDFTLTISSLQAEDVAVYYCKQSYSRRTFGGGTKVE | | |
| | | IK | | |
| Ab252 | 562 | QVQLVQSGAEVKKPGASVKVSCKASGYTFESYYMH | SAD10319_P02_E04 | HC amino acid sequence |
| | | WVRQAPGQRLERMGSIVAGTGATKYSQKFQGRVTIT | (ADI-57311) | |
| | | RDTSASTAYMELSSLRSEDTAVYYCARDHYGRYFYD | | |
| | | VWGQGTPVTVSS | | |
| Ab252 | 563 | DIVMTQSPDSLAVSLGERATINCKSSQSLLNARTGKN | SAD10319_P02_E04 | LC amino acid sequence |
| | | YLAWYQQKPGQPPKLLIYWASTRESGVPDRFSGSGS | (ADI-57311) | |
| | | GTDFTLTISSLQAEDVAVYYCKQSYSRRTFGGGTKVE | | |
| | | IK | | |
| Ab253 | 564 | QVQLVQSGAEVKKPGASVKVSCKASGYTFDSYTMH | SAD10319_P02_F04 | HC amino acid sequence |
| | | WVRQAPGQRLEWMGYINPDTGATYYSQKFQGRVTI | (ADI-57312) | |
| | | TRDTSASTAYMELSSLRSEDTAVYYCARDAYHHYFY | | |
| | | DVWGQGTLVTVSS | | |
| Ab253 | 565 | DIVMTQSPDSLAVSLGERATINCKSSQSLLNARTGKN | SAD10319_P02_F04 | LC amino acid sequence |
| | | YLAWYQQKPGQPPKLLIYWASTRESGVPDRFSGSGS | (ADI-57312) | |
| | | GTDFTLTISSLQAEDVAVYYCKQSYSRRTFGGGTKVE | | |
| | | IK | | |
| Ab254 | 566 | QVQLVQSGAEVKKPGASVKVSCKASGYTFTSYAMH | SAD10319_P02_H04 | HC amino acid sequence |
| | | WVRQAPGQRLEWMGWINPDTGATKYSQKFQGRVTI | (ADI-57313) | |
| | | TRDTSASTAYMELSSLRSEDTAVYYCARDAHGHYFY | | |
| | | DVWGQGTLVTVSS | | |
| Ab254 | 567 | DIVMTQSPDSLAVSLGERATINCKSSQSLLNARTGKN | SAD10319_P02_H04 | LC amino acid sequence |
| | | YLAWYQQKPGQPPKLLIYWASTRESGVPDRFSGSGS | (ADI-57313) | |
| | | GTDFTLTISSLQAEDVAVYYCKQSYSRRTFGGGTKVE | | |
| | | IK | | |
| Ab255 | 568 | QVQLVQSGAEVKKPGASVKVSCKASGYTFDSYAMH | SAD10319_P02_A05 | HC amino acid sequence |
| | | WVRQAPGQRLEWMGWINPNTGATTYSQKFQGRVTI | (ADI-48629) | |
| | | TRDTSASTAYMELSSLRSEDTAVYYCARDHYGHYFY | | |
| | | DVWGQGTLVTVSS | | |
| Ab255 | 569 | DIVMTQSPDSLAVSLGERATINCKSSQSLLNARTGKN | SAD10319_P02_A05 | LC amino acid sequence |
| | | YLAWYQQKPGQPPKLLIYWASTRESGVPDRFSGSGS | (ADI-48629) | |
| | | GTDFTLTISSLQAEDVAVYYCKQSYSRRTFGGGTKVE | | |
| | | IK | | |
| Ab256 | 570 | QVQLVQSGAEVKKPGASVKVSCKASGYTFADYAMH | SAD10319_P02_B05 | HC amino acid sequence |
| | | WVRQAPGQRLEWMGSINAGTGNTYYSQKFQGRVTI | (ADI-57314) | |
| | | TRDTSASTAYMELSSLRSEDTAVYYCARDAYGHYFY | | |
| | | DVWGQGTLVTVSS | | |
| Ab256 | 571 | DIVMTQSPDSLAVSLGERATINCKSSQSLLNARTGKN | SAD10319_P02_B05 | LC amino acid sequence |
| | | YLAWYQQKPGQPPKLLIYWASTRESGVPDRFSGSGS | (ADI-57314) | |
| | | GTDFTLTISSLQAEDVAVYYCKQSYSRRTFGGGTKVE | | |
| | | IK | | |
| Ab257 | 572 | QVQLVQSGAEVKKPGASVKVSCKASGYTFTDYNMH | SAD10319_P02_C05 | HC amino acid sequence |
| | | WVRQAPGQRLEWMGWINPLTGTTKYSQKFQGRVTI | (ADI-57315) | |
| | | TRDTSASTAYMELSSLRSEDTAVYYCARDAYHHYFY | | |
| | | DVWGQGTLVTVSS | | |
| Ab257 | 573 | DIVMTQSPDSLAVSLGERATINCKSSQSLLNARTGKN | SAD10319_P02_C05 | LC amino acid sequence |
| | | YLAWYQQKPGQPPKLLIYWASTRESGVPDRFSGSGS | (ADI-57315) | |
| | | GTDFTLTISSLQAEDVAVYYCKQSYSRRTFGGGTKVE | | |
| | | IK | | |
| Ab258 | 574 | QVQLVQSGAEVKKPGASVKVSCKASGYTFNDYAMH | SAD10319_P02_D05 | HC amino acid sequence |
| | | WVRQAPGQRLAWMGWIDAGTGNTYYSQKFQGRVTI | (ADI-57316) | |
| | | TRDTSASTAYMELSSLRSEDTAVYYCARDAHGHYFY | | |
| | | DVWGQGTLVTVSS | | |
| Ab258 | 575 | DIVMTQSPDSLAVSLGERATINCKSSQSLLNARTGKN | SAD10319_P02_D05 | LC amino acid sequence |
| | | YLAWYQQKPGQPPKLLIYWASTRESGVPDRFSGSGS | (ADI-57316) | |
| | | GTDFTLTISSLQAEDVAVYYCKQSYSRRTFGGGTKVE | | |
| | | IK | | |

TABLE 2
Binding and PSR Data

| | Human CD3 pH 6.0 | | | Human CD3 pH 7.4 | | | Cyno CD3 pH 6.0 | |
|---|---|---|---|---|---|---|---|---|
| Clone # | KD | kon | koff | KD | kon | koff | KD | kon |
| SAD10318_P01_D01 | 7.60E−08 | 2.82E+05 | 2.14E−02 | N.B. | | | 8.29E−08 | 2.22E+05 |
| SAD10318_P01_E01 | 1.16E−07 | 1.50E+05 | 1.72E−02 | N.B. | | | 9.44E−08 | 1.58E+05 |
| SAD10318_P01_A03 | 3.66E−08 | 3.43E+05 | 1.26E−02 | N.B. | | | 5.37E−08 | 2.87E+05 |
| SAD10318_P02_C04 | 2.35E−08 | 3.31E+05 | 7.78E−03 | 1.28E−07 | 1.64E+05 | 2.10E−02 | 3.00E−08 | 3.28E+05 |
| SAD10318_P02_A05 | 1.56E−09 | 4.55E+05 | 7.12E−04 | 3.77E−08 | 2.39E+05 | 9.00E−03 | 1.74E−09 | 4.90E+05 |
| SAD10319_P03_E07 | 4.09E−08 | 2.98E+05 | 1.22E−02 | N.B. | | | 5.53E−08 | 2.37E+05 |
| SAD10320_P01_B01 | 1.31E−07 | 1.22E+05 | 1.60E−02 | N.B. | | | 6.77E−08 | 1.64E+05 |
| SAD10320_P01_E01 | 5.01E−08 | 2.26E+05 | 1.13E−02 | N.B. | | | 1.27E−07 | 1.15E+05 |
| SAD10320_P02_D05 | 1.29E−09 | 4.69E+05 | 6.05E−04 | 3.17E−08 | 2.91E+05 | 9.23E−03 | 1.57E−09 | 4.87E+05 |
| SAD10320_P02_H05 | 2.13E−09 | 4.18E+05 | 8.88E−04 | 5.92E−08 | 2.41E+05 | 1.43E−02 | 2.86E−09 | 3.92E+05 |
| (ADI-48652) | | | | | | | | |
| LAD9965_P01_H07 | 1.64E−08 | 4.91E+05 | 8.07E−03 | 1.02E−07 | 2.55E+05 | 2.60E−02 | 1.66E−08 | 5.03E+05 |
| SAD10319_P03_C07 | 2.38E−08 | 3.31E+05 | 7.88E−03 | N.B. | | | 2.09E−07 | 8.54E+04 |
| LAD5224_P03_A01 | 1.99E−09 | 4.16E+05 | 8.29E−04 | 5.33E−09 | 3.00E+05 | 1.60E−03 | 1.27E−09 | 3.86E+05 |
| SAD10318_P01_F01 | 5.51E−08 | 3.18E+05 | 1.75E−02 | N.B. | | | 1.20E−07 | 1.40E+05 |
| SAD10318_P01_C03 | 1.61E−07 | 1.63E+05 | 2.62E−02 | 2.99E−07 | 6.56E+04 | 1.96E−02 | 3.47E−07 | 6.38E+04 |
| SAD10318_P01_E03 | 8.46E−08 | 2.43E+05 | 2.05E−02 | N.B. | | | 1.46E−08 | 2.67E+05 |
| SAD10318_P02_B04 | 1.71E−07 | 1.29E+05 | 2.20E−02 | N.B. | | | 1.06E−08 | 2.48E+05 |
| SAD10318_P02_D04 | 6.66E−08 | 2.86E+05 | 1.90E−02 | N.B. | | | 1.26E−07 | 1.29E+05 |
| SAD10318_P02_E04 | 1.93E−07 | 1.06E+05 | 2.05E−02 | 9.57E−08 | 1.42E+05 | 1.36E−02 | 3.21E−07 | 5.69E+04 |
| SAD10318_P02_F05 | 1.28E−07 | 2.20E+05 | 2.82E−02 | 1.20E−07 | 1.64E+05 | 1.98E−02 | 2.28E−07 | 1.06E+05 |
| SAD10318_P02_G05 | 9.46E−08 | 2.82E+05 | 2.67E−02 | 1.02E−07 | 2.32E+05 | 2.37E−02 | 2.61E−07 | 9.96E+04 |
| SAD10318_P02_B06 | 6.39E−08 | 3.65E+05 | 2.33E−02 | N.B. | | | 3.57E−08 | 2.54E+05 |
| SAD10318_P02_D06 | 2.07E−07 | 1.64E+05 | 3.38E−02 | N.B. | | | 1.26E−07 | 1.48E+05 |
| SAD10318_P02_E06 | 1.19E−07 | 1.93E+05 | 2.30E−02 | N.B. | | | 2.00E−07 | 9.14E+04 |
| SAD10318_P02_G06 | 1.06E−07 | 2.18E+05 | 2.31E−02 | 6.84E−08 | 2.46E+05 | 1.68E−02 | 2.22E−07 | 9.70E+04 |
| SAD10318_P03_B07 | 1.55E−07 | 1.67E+05 | 2.60E−02 | N.B. | | | 2.13E−08 | 2.26E+05 |
| SAD10318_P03_F07 | 4.08E−08 | 2.90E+05 | 1.18E−02 | N.B. | | | 1.06E−08 | 2.03E+05 |
| SAD10318_P03_G07 | 1.43E−08 | 2.51E+05 | 3.58E−03 | N.B. | | | 7.45E−09 | 2.46E+05 |
| SAD10318_P03_A08 | 8.11E−09 | 4.62E+05 | 3.75E−03 | N.B. | | | 2.43E−08 | 2.47E+05 |
| SAD10318_P03_B08 | 7.98E−08 | 2.15E+05 | 1.72E−02 | N.B. | | | 1.10E−08 | 2.76E+05 |
| SAD10318_P03_G08 | 5.18E−08 | 2.69E+05 | 1.39E−02 | N.B. | | | 2.83E−08 | 1.92E+05 |
| SAD10318_P03_F09 | 4.24E−08 | 2.23E+05 | 9.48E−03 | N.B. | | | 8.54E−09 | 1.63E+05 |
| SAD10318_P03_G09 | 6.02E−08 | 2.47E+05 | 1.49E−02 | N.B. | | | 2.78E−08 | 2.01E+05 |
| SAD10318_P04_D10 | 4.16E−08 | 3.40E+05 | 1.41E−02 | N.B. | | | 1.21E−08 | 2.07E+05 |
| SAD10318_P04_E10 | 8.39E−08 | 1.51E+05 | 1.27E−02 | N.B. | | | 1.28E−08 | 1.91E+05 |
| SAD10318_P04_F10 | 7.44E−08 | 1.99E+05 | 1.48E−02 | N.B. | | | 2.02E−08 | 2.15E+05 |
| SAD10318_P04_H10 | 5.01E−08 | 2.46E+05 | 1.23E−02 | N.B. | | | 1.03E−08 | 2.76E+05 |
| SAD10318_P04_A11 | N.B. | | | N.B. | | | N.B. | |
| SAD10318_P04_E11 | 7.88E−08 | 2.13E+05 | 1.68E−02 | N.B. | | | 1.06E−08 | 2.42E+05 |
| SAD10318_P04_F11 | 4.83E−08 | 2.56E+05 | 1.24E−02 | N.B. | | | 9.05E−09 | 2.02E+05 |
| SAD10318_P04_G11 | 2.72E−08 | 1.84E+05 | 5.00E−03 | N.B. | | | 1.06E−08 | 2.02E+05 |
| SAD10318_P04_F12 | N.B. | | | N.B. | | | N.B. | |
| SAD10318_P04_G12 | 4.14E−08 | 2.56E+05 | 1.06E−02 | N.B. | | | 1.12E−08 | 2.24E+05 |
| SAD10318_P04_H12 | 8.69E−08 | 1.79E+05 | 1.55E−02 | N.B. | | | 1.15E−08 | 2.21E+05 |
| SAD10319_P01_A01 | 9.14E−08 | 3.04E+05 | 2.78E−02 | N.B. | | | 4.92E−07 | 6.66E+04 |
| SAD10319_P01_C01 | 7.93E−08 | 2.44E+05 | 1.94E−02 | N.B. | | | 1.63E−08 | 2.47E+05 |
| SAD10319_P01_D01 | 7.87E−08 | 3.30E+05 | 2.60E−02 | N.B. | | | 3.22E−08 | 2.94E+05 |
| SAD10319_P01_E01 | 8.41E−08 | 3.40E+05 | 2.86E−02 | 3.23E−08 | 4.12E+05 | 1.33E−02 | 1.91E−07 | 1.47E+05 |
| SAD10319_P01_F01 | 6.63E−08 | 3.54E+05 | 2.35E−02 | N.B. | | | 8.16E−08 | 2.19E+05 |
| SAD10319_P01_G01 | 9.97E−08 | 2.24E+05 | 2.23E−02 | N.B. | | | 9.42E−09 | 2.64E+05 |
| SAD10319_P0l_A02 | 2.96E−08 | 3.49E+05 | 1.03E−02 | N.B. | | | 1.49E−07 | 1.11E+05 |
| SAD10319_P01_C02 | 2.40E−07 | 1.51E+05 | 3.62E−02 | N.B. | | | 2.20E−07 | 1.14E+05 |
| SAD10319_P01_D02 | 1.02E−07 | 2.01E+05 | 2.05E−02 | N.B. | | | 2.98E−08 | 2.30E+05 |
| SAD10319_P01_E02 | 1.14E−07 | 2.00E+05 | 2.28E−02 | 1.29E−07 | 2.20E+05 | 2.83E−02 | 1.62E−07 | 1.53E+05 |
| SAD10319_P01_F02 | 5.83E−08 | 3.32E+05 | 1.93E−02 | N.B. | | | 1.87E−08 | 2.79E+05 |
| SAD10319_P01_H02 | 8.15E−08 | 3.16E+05 | 2.57E−02 | N.B. | | | 2.94E−07 | 1.07E+05 |
| SAD10319_P01_B03 | 7.14E−08 | 3.43E+05 | 2.45E−02 | N.B. | | | 1.47E−07 | 1.66E+05 |
| SAD10319_P01_C03 | 8.13E−08 | 2.58E+05 | 2.10E−02 | N.B. | | | 1.47E−07 | 1.34E+05 |
| SAD10319_P01_D03 | 5.25E−08 | 3.42E+05 | 1.79E−02 | N.B. | | | 7.36E−09 | 3.00E+05 |
| SAD10319_P02_A04 | 4.36E−08 | 3.87E+05 | 1.69E−02 | N.B. | | | 1.86E−07 | 1.52E+05 |
| SAD10319_P02_B04 | 1.73E−07 | 1.93E+05 | 3.35E−02 | N.B. | | | 8.80E−08 | 2.31E+05 |
| SAD10319_P02_C04 | 3.56E−08 | 4.65E+05 | 1.66E−02 | N.B. | | | 1.11E−07 | 1.93E+05 |
| SAD10319_P02_D04 | 2.81E−08 | 4.70E+05 | 1.32E−02 | N.B. | | | 8.42E−09 | 3.83E+05 |
| SAD10319_P02_E04 | 5.79E−08 | 3.91E+05 | 2.26E−02 | 6.02E−08 | 4.32E+05 | 2.60E−02 | 1.02E−07 | 2.11E+05 |
| SAD10319_P02_F04 | 6.69E−08 | 3.66E+05 | 2.45E−02 | 2.21E−08 | 3.36E+05 | 7.43E−03 | 3.38E−07 | 9.38E+04 |
| SAD10319_P02_H04 | 1.15E−07 | 1.74E+05 | 2.00E−02 | N.B. | | | 1.20E−08 | 2.61E+05 |
| SAD10319_P02_A05 | 2.79E−07 | 1.52E+05 | 4.25E−02 | N.B. | | | 1.33E−07 | 2.02E+05 |
| SAD10319_P02_B05 | 5.58E−08 | 4.18E+05 | 2.33E−02 | 1.00E−08 | 5.20E+05 | 5.21E−03 | 3.43E−07 | 1.13E+05 |
| SAD10319_P02_C05 | 1.21E−07 | 1.94E+05 | 2.34E−02 | N.B. | | | 2.44E−08 | 2.86E+05 |
| SAD10319_P02_D05 | 2.78E−07 | 1.29E+05 | 3.59E−02 | 7.67E−09 | 3.58E+05 | 2.75E−03 | 1.00E−08 | 2.95E+05 |
| SAD10319_P02_F05 | 8.27E−08 | 2.85E+05 | 2.36E−02 | N.B. | | | 5.17E−07 | 5.08E+04 |
| SAD10319_P02_G05 | 2.75E−07 | 1.24E+05 | 3.42E−02 | N.B. | | | 1.67E−08 | 2.84E+05 |
| SAD10319_P02_H05 | 1.08E−07 | 2.16E+05 | 2.34E−02 | 4.31E−08 | 3.20E+05 | 1.38E−02 | 1.13E−07 | 1.68E+05 |
| SAD10319_P02_A06 | 2.78E−07 | 1.49E+05 | 4.13E−02 | 9.19E−08 | 2.15E+05 | 1.97E−02 | 2.56E−07 | 1.27E+05 |
| SAD10319_P02_B06 | 1.36E−07 | 2.20E+05 | 2.99E−02 | N.B. | | | 1.90E−08 | 2.80E+05 |
| SAD10319_P02_C06 | 6.21E−08 | 3.79E+05 | 2.36E−02 | 5.30E−08 | 5.14E+05 | 2.72E−02 | 9.63E−08 | 2.39E+05 |
| SAD10319_P02_D06 | 1.87E−07 | 1.73E+05 | 3.23E−02 | 2.04E−08 | 3.16E+05 | 6.45E−03 | 1.15E−07 | 1.85E+05 |
| SAD10319_P02_E06 | 2.19E−08 | 5.60E+05 | 1.22E−02 | 4.16E−08 | 5.57E+05 | 2.32E−02 | 4.84E−09 | 5.19E+05 |
| SAD10319_P02_F06 | 2.01E−07 | 1.94E+05 | 3.89E−02 | 3.64E−08 | 3.12E+05 | 1.14E−02 | 3.38E−08 | 3.60E+05 |
| SAD10319_P02_G06 | 6.22E−08 | 3.34E+05 | 2.08E−02 | N.B. | | | 1.49E−07 | 1.62E+05 |
| SAD10319_P02_H06 | 2.54E−07 | 1.37E+05 | 3.49E−02 | 1.07E−08 | 3.07E+05 | 3.29E−03 | 1.16E−07 | 1.62E+05 |
| SAD10319_P03_G07 | 1.27E−07 | 1.66E+05 | 2.11E−02 | N.B. | | | 2.48E−07 | 7.54E+04 |
| SAD10319_P03_H07 | 1.20E−07 | 1.95E+05 | 2.34E−02 | N.B. | | | 2.12E−07 | 9.48E+04 |
| SAD10319_P03_D08 | 2.20E−08 | 3.31E+05 | 7.27E−03 | N.B. | | | 1.80E−07 | 1.11E+05 |
| SAD10319_P03_E08 | 5.54E−08 | 3.14E+05 | 1.74E−02 | N.B. | | | 1.80E−07 | 1.10E+05 |
| SAD10319_P03_G08 | 3.09E−07 | 9.81E+04 | 3.03E−02 | N.B. | | | 1.33E−07 | 1.26E+05 |
| SAD10319_P03_H08 | 1.40E−07 | 1.98E+05 | 2.77E−02 | N.B. | | | 1.25E−08 | 2.77E+05 |
| SAD10319_P03_F09 | 4.10E−08 | 4.74E+05 | 1.95E−02 | N.B. | | | 1.05E−07 | 1.91E+05 |
| SAD10319_P03_G09 | 2.19E−07 | 1.36E+05 | 2.98E−02 | N.B. | | | 1.77E−07 | 1.24E+05 |
| SAD10319_P04_A10 | 1.21E−07 | 2.15E+05 | 2.61E−02 | N.B. | | | 3.05E−07 | 8.61E+04 |
| SAD10319_P04_B10 | 2.31E−07 | 1.50E+05 | 3.47E−02 | 3.34E−08 | 3.07E+05 | 1.03E−02 | 3.67E−08 | 3.46E+05 |
| SAD10319_P04_C10 | 1.84E−08 | 2.68E+05 | 4.94E−03 | N.B. | | | 1.06E−08 | 1.17E+05 |
| SAD10319_P04_G10 | 9.50E−08 | 2.42E+05 | 2.30E−02 | 6.31E−08 | 3.36E+05 | 2.12E−02 | 6.51E−08 | 2.30E+05 |
| SAD10319_P04_B11 | 9.84E−08 | 1.98E+05 | 1.95E−02 | N.B. | | | 8.69E−09 | 3.14E+05 |
| SAD10319_P04_C11 | 3.91E−08 | 3.18E+05 | 1.24E−02 | 1.58E−08 | 2.88E+05 | 4.56E−03 | 1.14E−08 | 2.78E+05 |
| SAD10319_P04_D11 | 9.79E−08 | 1.96E+05 | 1.92E−02 | N.B. | | | 1.43E−08 | 2.36E+05 |
| SAD10319_P04_E11 | 1.67E−07 | 1.39E+05 | 2.33E−02 | N.B. | | | 1.85E−07 | 1.29E+05 |
| SAD10319_P04_F11 | 4.43E−08 | 2.58E+05 | 1.14E−02 | N.B. | | | 6.07E−09 | 3.34E+05 |
| SAD10319_P04_G11 | 8.10E−09 | 3.32E+05 | 2.69E−03 | N.B. | | | 1.52E−08 | 2.08E+05 |
| SAD10319_P04_B12 | N.B. | | | N.B. | | | N.B. | |
| SAD10319_P04_C12 | 2.67E−07 | 9.92E+04 | 2.64E−02 | N.B. | | | 2.17E−07 | 9.01E+04 |
| SAD10319_P04_D12 | 1.40E−07 | 2.01E+05 | 2.82E−02 | N.B. | | | 6.37E−08 | 1.88E+05 |
| SAD10319_P04_E12 | 7.67E−09 | 3.83E+05 | 2.93E−03 | N.B. | | | 1.11E−08 | 2.76E+05 |
| SAD10319_P04_F12 | 4.32E−08 | 3.99E+05 | 1.72E−02 | N.B. | | | 1.04E−07 | 1.55E+05 |
| SAD10319_P04_H12 | 2.91E−07 | 1.10E+05 | 3.20E−02 | 2.93E−08 | 3.41E+05 | 1.00E−02 | 1.53E−08 | 3.07E+05 |
| SAD10320_P01_F01 | 2.78E−07 | 1.12E+05 | 3.10E−02 | 2.21E−08 | 1.99E+05 | 4.40E−03 | 2.78E−08 | 2.31E+05 |
| SAD10320_P01_G01 | 5.91E−07 | 5.62E+04 | 3.32E−02 | N.B. | | | 8.70E−08 | 1.65E+05 |
| SAD10320_P01_H01 | 2.27E−08 | 3.79E+05 | 8.60E−03 | N.B. | | | 2.20E−07 | 9.44E+04 |
| SAD10320_P01_C02 | 3.37E−08 | 2.85E+05 | 9.60E−03 | N.B. | | | 1.22E−08 | 2.27E+05 |
| SAD10320_P01_E02 | 2.54E−07 | 1.44E+05 | 3.66E−02 | 3.75E−08 | 3.76E+05 | 1.41E−02 | 1.79E−08 | 3.26E+05 |
| SAD10320_P01_F02 | 4.97E−08 | 3.23E+05 | 1.60E−02 | N.B. | | | 2.24E−07 | 8.65E+04 |
| SAD10320_P01_G02 | 2.75E−07 | 1.03E+05 | 2.83E−02 | N.B. | | | 2.66E−07 | 7.40E+04 |
| SAD10320_P01_H02 | 2.97E−07 | 1.15E+05 | 3.41E−02 | 1.43E−08 | 2.51E+05 | 3.58E−03 | 1.08E−08 | 3.09E+05 |
| SAD10320_P01_A03 | 1.02E−07 | 2.28E+05 | 2.33E−02 | 1.20E−07 | 1.71E+05 | 2.04E−02 | 3.75E−07 | 7.24E+04 |
| SAD10320_P01_B03 | 6.91E−08 | 2.58E+05 | 1.78E−02 | 1.70E−07 | 1.19E+05 | 2.02E−02 | 2.39E−07 | 8.55E+04 |
| SAD10320_P01_C03 | 4.04E−08 | 4.25E+05 | 1.71E−02 | N.B. | | | 1.73E−07 | 1.13E+05 |
| SAD10320_P01_D03 | 2.33E−07 | 1.39E+05 | 3.23E−02 | 1.02E−08 | 2.06E+05 | 2.10E−03 | 9.56E−09 | 2.76E+05 |
| SAD10320_P01_E03 | 1.05E−07 | 3.14E+05 | 3.30E−02 | 2.14E−08 | 3.10E+05 | 6.64E−03 | 1.69E−07 | 1.32E+05 |
| SAD10320_P01_G03 | 2.55E−07 | 1.28E+05 | 3.27E−02 | N.B. | | | 1.87E−07 | 1.15E+05 |
| SAD10320_P01_H03 | 1.95E−07 | 1.49E+05 | 2.91E−02 | 5.52E−08 | 2.37E+05 | 1.31E−02 | 1.03E−08 | 2.82E+05 |
| SAD10320_P02_A04 | 1.97E−07 | 1.39E+05 | 2.73E−02 | N.B. | | | 2.05E−07 | 8.89E+04 |
| SAD10320_P02_B04 | 8.92E−08 | 2.65E+05 | 2.36E−02 | N.B. | | | 1.39E−07 | 1.26E+05 |
| SAD10320_P02_H04 | 9.38E−08 | 2.88E+05 | 2.70E−02 | 2.82E−08 | 3.02E+05 | 8.50E−03 | 4.50E−07 | 6.18E+04 |
| SAD10320_P02_A05 | 8.47E−08 | 2.63E+05 | 2.23E−02 | N.B. | | | 1.24E−07 | 1.35E+05 |
| SAD10320_P02_B05 | 2.60E−07 | 1.30E+05 | 3.38E−02 | N.B. | | | 9.00E−09 | 2.99E+05 |
| SAD10320_P02_C05 | 4.33E−08 | 3.48E+05 | 1.51E−02 | N.B. | | | 3.56E−07 | 5.80E+04 |
| SAD10320_P02_E05 | P.F. | | | N.B. | | | 1.45E−08 | 2.19E+05 |
| SAD10320_P02_A06 | P.F. | | | N.B. | | | 1.16E−08 | 2.28E+05 |
| SAD10320_P02_D06 | P.F. | | | N.B. | | | 2.34E−08 | 2.65E+05 |
| SAD10320_P02_E06 | P.F. | | | 1.20E−08 | 4.17E+05 | 4.99E−03 | 3.46E−07 | 8.75E+04 |
| SAD10320_P02_F06 | 3.24E−07 | 9.92E+04 | 3.22E−02 | 4.08E−08 | 1.87E+05 | 7.61E−03 | 1.67E−07 | 1.02E+05 |
| SAD10320_P02_G06 | 3.14E−07 | 1.31E+05 | 4.12E−02 | 4.59E−08 | 3.70E+05 | 1.70E−02 | 1.17E−08 | 3.31E+05 |
| SAD10320_P02_H06 | P.F. | | | N.B. | | | 1.05E−08 | 2.68E+05 |
| SAD10320_P03_B07 | 1.20E−07 | 1.51E+05 | 1.82E−02 | N.B. | | | 9.49E−09 | 2.36E+05 |
| SAD10320_P03_E07 | P.F. | | | N.B. | | | 3.38E−08 | 2.07E+05 |
| SAD10320_P03_H07 | N.B. | | | N.B. | | | N.B. | |
| SAD10320_P03_C08 | P.F. | | | N.B. | | | 3.23E−07 | 4.69E+04 |
| SAD10320_P03_D08 | P.F. | | | N.B. | | | 7.76E−09 | 2.49E+05 |
| SAD10320_P03_F08 | P.F. | | | N.B. | | | 1.50E−08 | 1.79E+05 |
| SAD10320_P03_H08 | P.F. | | | N.B. | | | 1.81E−07 | 8.27E+04 |
| SAD10320_P03_A09 | P.F. | | | N.B. | | | 1.46E−08 | 1.99E+05 |
| SAD10320_P03_C09 | P.F. | | | N.B. | | | 3.16E−08 | 1.61E+05 |
| SAD10320_P03_F09 | P.F. | | | N.B. | | | 3.70E−08 | 1.95E+05 |
| SAD10320_P04_A10 | P.F. | | | N.B. | | | 1.43E−07 | 1.01E+05 |
| SAD10320_P04_C10 | P.F. | | | N.B. | | | 1.68E−07 | 1.11E+05 |
| SAD10320_P04_D10 | 1.37E−07 | 1.17E+05 | 1.60E−02 | N.B. | | | 3.09E−07 | 5.54E+04 |
| SAD10320_P04_E10 | P.F. | | | N.B. | | | 1.24E−08 | 2.07E+05 |
| SAD10320_P04_F10 | P.F. | | | N.B. | | | 8.51E−09 | 2.81E+05 |
| SAD10320_P04_G10 | P.F. | | | N.B. | | | 3.52E−07 | 5.38E+04 |
| SAD10320_P04_A11 | P.F. | | | N.B. | | | 2.94E−08 | 2.52E+05 |
| SAD10320_P04_D11 | P.F. | | | N.B. | | | 1.69E−08 | 2.00E+05 |
| SAD10320_P04_E11 | N.B. | | | N.B. | | | 2.01E−08 | 1.48E+05 |
| SAD10320_P04_F11 | P.F. | | | N.B. | | | 9.55E−09 | 2.01E+05 |
| SAD10320_P04_G11 | P.F. | | | N.B. | | | 1.57E−08 | 1.76E+05 |
| SAD10320_P04_A12 | P.F. | | | N.B. | | | 2.40E−07 | 6.97E+04 |
| SAD10320_P04_D12 | P.F. | | | N.B. | | | 1.39E−08 | 1.86E+05 |
| SAD10320_P04_E12 | P.F. | | | N.B. | | | 7.98E−08 | 1.36E+05 |
| SAD10320_P04_F12 | N.B. | | | N.B. | | | 2.33E−08 | 1.11E+05 |
| SAD10319_P05_A01 | 1.04E−07 | 1.86E+05 | 1.94E−02 | N.B. | | | 1.58E−07 | 1.59E+05 |
| SAD10319_P05_A02 | 9.66E−08 | 2.70E+05 | 2.61E−02 | N.B. | | | 1.92E−07 | 1.28E+05 |
| SAD10319_P05_A03 | 3.39E−08 | 4.78E+05 | 1.62E−02 | N.B. | | | 4.16E−08 | 3.06E+05 |
| SAD10319_P05_A05 | 6.04E−08 | 5.20E+05 | 3.14E−02 | N.B. | | | 3.26E−08 | 3.63E+05 |
| SAD10319_P05_B02 | 7.89E−08 | 3.29E+05 | 2.59E−02 | N.B. | | | 1.59E−08 | 2.59E+05 |
| SAD10319_P05_B03 | 6.45E−08 | 4.16E+05 | 2.68E−02 | 4.82E−08 | 3.48E+05 | 1.67E−02 | 2.24E−07 | 1.54E+05 |
| SAD10319_P05_B04 | 6.41E−08 | 4.16E+05 | 2.67E−02 | N.B. | | | 8.81E−09 | 2.93E+05 |
| SAD10319_P05_B05 | 4.47E−08 | 4.44E+05 | 1.99E−02 | N.B. | | | 1.40E−08 | 4.67E+05 |
| SAD10319_P05_C01 | 7.11E−08 | 3.16E+05 | 2.24E−02 | N.B. | | | 3.80E−08 | 3.41E+05 |
| SAD10319_P05_C03 | 6.84E−08 | 3.10E+05 | 2.12E−02 | N.B. | | | 1.24E−08 | 2.63E+05 |
| SAD10319_P05_C05 | 6.69E−08 | 3.62E+05 | 2.42E−02 | N.B. | | | 2.71E−08 | 3.03E+05 |
| SAD10319_P05_D01 | 1.69E−07 | 1.79E+05 | 3.03E−02 | N.B. | | | 3.59E−08 | 2.59E+05 |
| SAD10319_P05_D02 | 2.94E−07 | 1.42E+05 | 4.18E−02 | N.B. | | | 1.44E−07 | 1.68E+05 |
| SAD10319_P05_D03 | 7.40E−08 | 3.18E+05 | 2.36E−02 | N.B. | | | 1.66E−07 | 1.40E+05 |
| SAD10319_P05_D04 | 4.75E−08 | 4.30E+05 | 2.04E−02 | N.B. | | | 1.12E−07 | 1.96E+05 |
| SAD10319_P05_D05 | 8.23E−08 | 3.31E+05 | 2.73E−02 | N.B. | | | 4.69E−08 | 3.37E+05 |
| SAD10319_P05_E04 | 4.33E−08 | 3.37E+05 | 1.46E−02 | N.B. | | | 1.23E−08 | 3.04E+05 |
| SAD10319_P05_F01 | 3.03E−08 | 4.23E+05 | 1.28E−02 | N.B. | | | 1.25E−07 | 1.72E+05 |
| SAD10319_P05_G01 | 5.93E−08 | 4.23E+05 | 2.51E−02 | N.B. | | | 1.36E−07 | 1.74E+05 |
| SAD10319_P05_G02 | 4.30E−08 | 4.96E+05 | 2.13E−02 | N.B. | | | 4.40E−08 | 3.55E+05 |
| SAD10319_P05_G03 | 3.35E−07 | 1.27E+05 | 4.25E−02 | 1.72E−07 | 2.55E+05 | 4.39E−02 | 4.64E−08 | 3.60E+05 |
| SAD10319_P05_G04 | 4.03E−08 | 3.39E+05 | 1.37E−02 | N.B. | | | 1.24E−08 | 3.14E+05 |
| SAD10319_P05_H06 | 1.62E−07 | 1.72E+05 | 2.78E−02 | N.B. | | | 3.41E−08 | 3.04E+05 |
| SAD10319_P06_A07 | N.B. | | | N.B. | | | N.B. | |
| SAD10319_P06_A10 | 1.04E−07 | 2.10E+05 | 2.18E−02 | N.B. | | | 1.61E−07 | 1.52E+05 |
| SAD10319_P06_A11 | 2.18E−08 | 3.55E+05 | 7.74E−03 | N.B. | | | 1.02E−08 | 2.74E+05 |
| SAD10319_P06_B10 | 5.00E−08 | 3.52E+05 | 1.76E−02 | N.B. | | | 6.34E−09 | 3.15E+05 |
| SAD10319_P06_B11 | 2.31E−07 | 1.33E+05 | 3.07E−02 | N.B. | | | 3.55E−08 | 2.85E+05 |
| SAD10319_P06_C10 | 8.77E−08 | 2.36E+05 | 2.07E−02 | N.B. | | | 1.03E−08 | 3.07E+05 |
| SAD10319_P06_C12 | 1.10E−07 | 2.17E+05 | 2.39E−02 | N.B. | | | 3.20E−08 | 2.36E+05 |
| SAD10319_P06_D12 | 7.06E−08 | 3.90E+05 | 2.76E−02 | N.B. | | | 5.30E−08 | 3.63E+05 |
| SAD10319_P06_E08 | 1.24E−07 | 2.68E+05 | 3.33E−02 | N.B. | | | 2.86E−08 | 3.67E+05 |
| SAD10319_P06_E09 | 3.53E−08 | 4.58E+05 | 1.62E−02 | N.B. | | | 3.41E−08 | 3.57E+05 |
| SAD10319_P06_E10 | 8.63E−09 | 4.14E+05 | 3.58E−03 | N.B. | | | 1.98E−08 | 2.90E+05 |
| SAD10319_P06_F07 | 1.39E−07 | 1.71E+05 | 2.38E−02 | N.B. | | | 2.83E−07 | 8.84E+04 |
| SAD10319_P06_F10 | 7.82E−08 | 3.13E+05 | 2.45E−02 | N.B. | | | 1.91E−08 | 3.47E+05 |
| SAD10319_P06_G09 | 5.08E−08 | 3.01E+05 | 1.53E−02 | N.B. | | | 7.42E−09 | 3.48E+05 |
| SAD10319_P06_G11 | 4.18E−08 | 3.83E+05 | 1.60E−02 | N.B. | | | 2.79E−08 | 3.31E+05 |
| SAD10319_P06_H07 | 1.04E−08 | 3.74E+05 | 3.90E−03 | N.B. | | | 4.11E−08 | 2.19E+05 |
| SAD10319_P06_H08 | 9.89E−08 | 2.93E+05 | 2.89E−02 | N.B. | | | 1.39E−07 | 1.66E+05 |
| SAD10319_P06_H10 | 1.15E−08 | 4.14E+05 | 4.74E−03 | N.B. | | | 2.15E−07 | 1.24E+05 |
| SAD10319_P06_H11 | 9.27E−09 | 3.81E+05 | 3.53E−03 | N.B. | | | 2.33E−07 | 1.22E+05 |
| LAD9953_P01_H01 | 3.99E−08 | 3.50E+05 | 1.39E−02 | 5.83E−08 | 3.59E+05 | 2.10E−02 | 6.14E−08 | 2.86E+05 |
| LAD9954_P01_B02 | 1.63E−07 | 1.68E+05 | 2.73E−02 | 1.13E−07 | 2.63E+05 | 2.98E−02 | 3.89E−07 | 7.78E+04 |
| LAD9955_P01_G02 | 1.05E−08 | 3.32E+05 | 3.48E−03 | 3.71E−08 | 3.31E+05 | 1.23E−02 | 5.29E−07 | 5.34E+04 |
| LAD9956_P01_C03 | N.B. | | | N.B. | | | 1.87E−09 | 4.89E+05 |
| LAD9959_P01_E04 | 4.57E−09 | 4.17E+05 | 1.91E−03 | 4.78E−08 | 3.78E+05 | 1.80E−02 | 4.45E−09 | 3.91E+05 |
| LAD9960_P01_D05 | N.B. | | | N.B. | | | N.B. | |
| LAD9963_P01_E06 | 3.56E−09 | 6.03E+05 | 2.14E−03 | N.B. | | | 2.42E−09 | 3.58E+05 |
| LAD9964_P01_C07 | 1.10E−09 | 3.56E+05 | 3.92E−04 | 4.25E−09 | 3.92E+05 | 1.67E−03 | 1.50E−09 | 4.25E+05 |
| LAD9966_P01_A08 | 1.98E−07 | 1.34E+05 | 2.66E−02 | 5.08E−08 | 2.67E+05 | 1.36E−02 | 9.80E−09 | 3.58E+05 |

| | | | | | PSR | |
|---|---|---|---|---|---|---|
| | Cyno CD3 pH 6.0 | Cyno CD3 pH 7.4 | | | normalized | PSR |
| Clone # | koff | KD | kon | koff | MFI | Score |
| SAD10318_P01_D01 | 1.84E−02 | N.B. | | | 106.85 | 0.04 |
| SAD10318_P01_E01 | 1.49E−02 | N.B. | | | 106.69 | 0.04 |
| SAD10318_P01_A03 | 1.54E−02 | N.B. | | | 109.86 | 0.05 |
| SAD10318_P02_C04 | 9.83E−03 | 9.77E−08 | 1.75E+05 | 1.71E−02 | 132.21 | 0.10 |
| SAD10318_P02_A05 | 8.53E−04 | 3.24E−08 | 2.32E+05 | 7.51E−03 | 252.57 | 0.13 |
| SAD10319_P03_E07 | 1.31E−02 | N.B. | | | 94.38 | 0.01 |
| SAD10320_P01_B01 | 1.11E−02 | N.B. | | | 112.55 | 0.05 |
| SAD10320_P01_E01 | 1.46E−02 | N.B. | | | 109.18 | 0.05 |
| SAD10320_P02_D05 | 7.66E−04 | 2.93E−08 | 2.68E+05 | 7.87E−03 | 123.53 | 0.08 |
| SAD10320_P02_H05 | 1.12E−03 | 9.90E−08 | 1.76E+05 | 1.74E−02 | 131.9 | 0.10 |
| (ADI-48652) | | | | | | |
| LAD9965_P01_H07 | 8.33E−03 | 1.15E−07 | 2.08E+05 | 2.39E−02 | 341.62 | 0.16 |
| SAD10319_P03_C07 | 1.78E−02 | N.B. | | | 3195.94 | 0.532 |
| LAD5224_P03_A01 | 4.90E−04 | 7.08E−09 | 3.46E+05 | 2.45E−03 | 2930.88 | 0.492 |
| SAD10318_P01_F01 | 1.68E−02 | N.B. | | | 966.39 | 0.209 |
| SAD10318_P01_C03 | 2.21E−02 | 6.77E−08 | 2.23E+05 | 1.51E−02 | 8340.98 | 0.920 |
| SAD10318_P01_E03 | 3.89E−03 | N.B. | | | 3888.12 | 0.637 |
| SAD10318_P02_B04 | 2.63E−03 | N.B. | | | 1444.56 | 0.273 |
| SAD10318_P02_D04 | 1.63E−02 | N.B. | | | 1789.14 | 0.320 |
| SAD10318_P02_E04 | 1.82E−02 | 5.74E−08 | 2.82E+05 | 1.62E−02 | 1707.85 | 0.309 |
| SAD10318_P02_F05 | 2.42E−02 | 6.40E−08 | 2.57E+05 | 1.65E−02 | 5954.14 | 0.806 |
| SAD10318_P02_G05 | 2.59E−02 | 6.49E−08 | 3.53E+05 | 2.29E−02 | 2186.89 | 0.379 |
| SAD10318_P02_B06 | 9.05E−03 | N.B. | | | 7212.32 | 0.876 |
| SAD10318_P02_D06 | 1.86E−02 | N.B. | | | 2313.88 | 0.398 |
| SAD10318_P02_E06 | 1.83E−02 | N.B. | | | 8302.93 | 0.919 |
| SAD10318_P02_G06 | 2.16E−02 | 1.01E−07 | 3.18E+05 | 3.22E−02 | 7435.47 | 0.886 |
| SAD10318_P03_B07 | 4.82E−03 | N.B. | | | 4829.08 | 0.724 |
| SAD10318_P03_F07 | 2.15E−03 | N.B. | | | 4533.75 | 0.700 |
| SAD10318_P03_G07 | 1.83E−03 | N.B. | | | 1611.89 | 0.296 |
| SAD10318_P03_A08 | 6.00E−03 | N.B. | | | 711.16 | 0.174 |
| SAD10318_P03_B08 | 3.03E−03 | N.B. | | | 3156.39 | 0.526 |
| SAD10318_P03_G08 | 5.44E−03 | N.B. | | | 5617.87 | 0.783 |
| SAD10318_P03_F09 | 1.39E−03 | N.B. | | | 588.33 | 0.158 |
| SAD10318_P03_G09 | 5.59E−03 | N.B. | | | 998.08 | 0.213 |
| SAD10318_P04_D10 | 2.51E−03 | N.B. | | | 2579.89 | 0.438 |
| SAD10318_P04_E10 | 2.45E−03 | N.B. | | | 1465.46 | 0.276 |
| SAD10318_P04_F10 | 4.36E−03 | N.B. | | | 6953.75 | 0.864 |
| SAD10318_P04_H10 | 2.84E−03 | N.B. | | | 541.41 | 0.151 |
| SAD10318_P04_A11 | | N.B. | | | 8475.24 | 0.924 |
| SAD10318_P04_E11 | 2.56E−03 | N.B. | | | 2696.05 | 0.456 |
| SAD10318_P04_F11 | 1.83E−03 | N.B. | | | 4244.97 | 0.677 |
| SAD10318_P04_G11 | 2.15E−03 | N.B. | | | 2967.69 | 0.497 |
| SAD10318_P04_F12 | | N.B. | | | 6479.03 | 0.838 |
| SAD10318_P04_G12 | 2.50E−03 | N.B. | | | 607.37 | 0.160 |
| SAD10318_P04_H12 | 2.54E−03 | N.B. | | | 489.06 | 0.144 |
| SAD10319_P01_A01 | 3.28E−02 | N.B. | | | 12595.42 | 0.981 |
| SAD10319_P01_C01 | 4.02E−03 | N.B. | | | 10382.82 | 0.963 |
| SAD10319_P01_D01 | 9.46E−03 | N.B. | | | 11570.57 | 0.975 |
| SAD10319_P01_E01 | 2.81E−02 | N.B. | | | 8875.40 | 0.935 |
| SAD10319_P01_F01 | 1.79E−02 | N.B. | | | 9035.92 | 0.939 |
| SAD10319_P01_G01 | 2.49E−03 | N.B. | | | 11014.25 | 0.970 |
| SAD10319_P0l_A02 | 1.65E−02 | N.B. | | | 10609.41 | 0.965 |
| SAD10319_P01_C02 | 2.51E−02 | N.B. | | | 14703.85 | 0.987 |
| SAD10319_P01_D02 | 6.86E−03 | N.B. | | | 1104.87 | 0.227 |
| SAD10319_P01_E02 | 2.48E−02 | 1.45E−07 | 2.45E+05 | 3.55E−02 | 11649.96 | 0.975 |
| SAD10319_P01_F02 | 5.22E−03 | N.B. | | | 9918.89 | 0.956 |
| SAD10319_P01_H02 | 3.14E−02 | N.B. | | | 11677.80 | 0.975 |
| SAD10319_P01_B03 | 2.45E−02 | N.B. | | | 9527.89 | 0.949 |
| SAD10319_P01_C03 | 1.96E−02 | N.B. | | | 12864.36 | 0.982 |
| SAD10319_P01_D03 | 2.21E−03 | N.B. | | | 12525.77 | 0.980 |
| SAD10319_P02_A04 | 2.84E−02 | N.B. | | | 6185.14 | 0.820 |
| SAD10319_P02_B04 | 2.03E−02 | N.B. | | | 12957.80 | 0.982 |
| SAD10319_P02_C04 | 2.15E−02 | N.B. | | | 11399.52 | 0.973 |
| SAD10319_P02_D04 | 3.22E−03 | N.B. | | | 13848.24 | 0.985 |
| SAD10319_P02_E04 | 2.15E−02 | 6.41E−08 | 3.24E+05 | 2.08E−02 | 14297.04 | 0.986 |
| SAD10319_P02_F04 | 3.17E−02 | 1.17E−07 | 2.57E+05 | 3.01E−02 | 12927.52 | 0.982 |
| SAD10319_P02_H04 | 3.13E−03 | N.B. | | | 13710.09 | 0.985 |
| SAD10319_P02_A05 | 2.69E−02 | N.B. | | | 13622.12 | 0.984 |
| SAD10319_P02_B05 | 3.88E−02 | N.B. | | | 15510.92 | 0.988 |
| SAD10319_P02_C05 | 6.97E−03 | N.B. | | | 13558.13 | 0.984 |
| SAD10319_P02_D05 | 2.96E−03 | N.B. | | | 7092.88 | 0.871 |
| SAD10319_P02_F05 | 2.62E−02 | N.B. | | | 12207.03 | 0.979 |
| SAD10319_P02_G05 | 4.75E−03 | N.B. | | | 12832.35 | 0.982 |
| SAD10319_P02_H05 | 1.90E−02 | N.B. | | | 13554.59 | 0.984 |
| SAD10319_P02_A06 | 3.27E−02 | 3.02E−08 | 3.83E+05 | 1.15E−02 | 13214.36 | 0.983 |
| SAD10319_P02_B06 | 5.31E−03 | N.B. | | | 11753.86 | 0.976 |
| SAD10319_P02_C06 | 2.30E−02 | 5.13E−08 | 4.96E+05 | 2.55E−02 | 18024.91 | 0.989 |
| SAD10319_P02_D06 | 2.12E−02 | N.B. | | | 9677.15 | 0.952 |
| SAD10319_P02_E06 | 2.51E−03 | 6.06E−08 | 4.40E+05 | 2.67E−02 | 16828.70 | 0.989 |
| SAD10319_P02_F06 | 1.22E−02 | 1.34E−07 | 2.47E+05 | 3.31E−02 | 13621.05 | 0.984 |
| SAD10319_P02_G06 | 2.42E−02 | N.B. | | | 14664.07 | 0.987 |
| SAD10319_P02_H06 | 1.88E−02 | 7.80E−08 | 2.20E+05 | 1.71E−02 | 12408.54 | 0.980 |
| SAD10319_P03_G07 | 1.87E−02 | N.B. | | | 469.51 | 0.142 |
| SAD10319_P03_H07 | 2.01E−02 | N.B. | | | 14249.51 | 0.986 |
| SAD10319_P03_D08 | 2.00E−02 | N.B. | | | 12086.73 | 0.978 |
| SAD10319_P03_E08 | 1.97E−02 | N.B. | | | 1182.04 | 0.238 |
| SAD10319_P03_G08 | 1.68E−02 | N.B. | | | 12995.09 | 0.982 |
| SAD10319_P03_H08 | 3.48E−03 | N.B. | | | 14218.49 | 0.986 |
| SAD10319_P03_F09 | 1.99E−02 | N.B. | | | 12221.31 | 0.979 |
| SAD10319_P03_G09 | 2.19E−02 | N.B. | | | 13882.32 | 0.985 |
| SAD10319_P04_A10 | 2.62E−02 | N.B. | | | 15945.11 | 0.988 |
| SAD10319_P04_B10 | 1.27E−02 | 5.88E−08 | 3.38E+05 | 1.99E−02 | 14000.13 | 0.985 |
| SAD10319_P04_C10 | 1.24E−03 | N.B. | | | 14340.11 | 0.986 |
| SAD10319_P04_G10 | 1.50E−02 | 6.26E−08 | 2.91E+05 | 1.82E−02 | 10206.29 | 0.960 |
| SAD10319_P04_B11 | 2.73E−03 | N.B. | | | 11397.82 | 0.973 |
| SAD10319_P04_C11 | 3.17E−03 | N.B. | | | 12612.64 | 0.981 |
| SAD10319_P04_D11 | 3.39E−03 | N.B. | | | 12771.61 | 0.981 |
| SAD10319_P04_E11 | 2.39E−02 | N.B. | | | 14750.42 | 0.987 |
| SAD10319_P04_F11 | 2.02E−03 | N.B. | | | 13416.98 | 0.984 |
| SAD10319_P04_G11 | 3.17E−03 | N.B. | | | 7622.78 | 0.894 |
| SAD10319_P04_B12 | | N.B. | | | 15406.32 | 0.988 |
| SAD10319_P04_C12 | 1.96E−02 | N.B. | | | 11966.44 | 0.977 |
| SAD10319_P04_D12 | 1.20E−02 | N.B. | | | 11989.11 | 0.977 |
| SAD10319_P04_E12 | 3.07E−03 | N.B. | | | 12187.23 | 0.979 |
| SAD10319_P04_F12 | 1.62E−02 | N.B. | | | 2421.46 | 0.414 |
| SAD10319_P04_H12 | 4.70E−03 | N.B. | | | 13324.27 | 0.983 |
| SAD10320_P01_F01 | 6.42E−03 | N.B. | | | 5311.73 | 0.761 |
| SAD10320_P01_G01 | 1.44E−02 | N.B. | | | 560.62 | 0.154 |
| SAD10320_P01_H01 | 2.07E−02 | N.B. | | | 3157.88 | 0.526 |
| SAD10320_P01_C02 | 2.77E−03 | N.B. | | | 2863.73 | 0.481 |
| SAD10320_P01_E02 | 5.85E−03 | 6.86E−08 | 3.04E+05 | 2.08E−02 | 7659.32 | 0.896 |
| SAD10320_P01_F02 | 1.94E−02 | N.B. | | | 667.21 | 0.168 |
| SAD10320_P01_G02 | 1.97E−02 | N.B. | | | 601.03 | 0.160 |
| SAD10320_P01_H02 | 3.34E−03 | N.B. | | | 868.35 | 0.196 |
| SAD10320_P01_A03 | 2.71E−02 | 7.84E−08 | 2.22E+05 | 1.74E−02 | 11115.10 | 0.971 |
| SAD10320_P01_B03 | 2.04E−02 | 7.51E−08 | 2.12E+05 | 1.59E−02 | 3130.48 | 0.522 |
| SAD10320_P01_C03 | 1.95E−02 | N.B. | | | 644.83 | 0.165 |
| SAD10320_P01_D03 | 2.63E−03 | N.B. | | | 690.14 | 0.172 |
| SAD10320_P01_E03 | 2.23E−02 | N.B. | | | 5363.88 | 0.764 |
| SAD10320_P01_G03 | 2.15E−02 | N.B. | | | 651.23 | 0.166 |
| SAD10320_P01_H03 | 2.91E−03 | N.B. | | | 479.13 | 0.143 |
| SAD10320_P02_A04 | 1.82E−02 | N.B. | | | 1289.55 | 0.252 |
| SAD10320_P02_B04 | 1.76E−02 | N.B. | | | 711.54 | 0.174 |
| SAD10320_P02_H04 | 2.78E−02 | N.B. | | | 670.12 | 0.169 |
| SAD10320_P02_A05 | 1.68E−02 | N.B. | | | 544.78 | 0.152 |
| SAD10320_P02_B05 | 2.69E−03 | N.B. | | | 461.81 | 0.141 |
| SAD10320_P02_C05 | 2.07E−02 | N.B. | | | 508.90 | 0.147 |
| SAD10320_P02_E05 | 3.18E−03 | N.B. | | | 2084.14 | 0.363 |
| SAD10320_P02_A06 | 2.64E−03 | N.B. | | | 399.07 | 0.132 |
| SAD10320_P02_D06 | 6.21E−03 | N.B. | | | 728.55 | 0.177 |
| SAD10320_P02_E06 | 3.03E−02 | P.F. | | | 813.34 | 0.188 |
| SAD10320_P02_F06 | 1.70E−02 | 1.41E−07 | 1.18E+05 | 1.66E−02 | 747.20 | 0.179 |
| SAD10320_P02_G06 | 3.87E−03 | 6.48E−08 | 3.38E+05 | 2.19E−02 | 8416.42 | 0.922 |
| SAD10320_P02_H06 | 2.81E−03 | N.B. | | | 584.38 | 0.157 |
| SAD10320_P03_B07 | 2.24E−03 | N.B. | | | 381.32 | 0.130 |
| SAD10320_P03_E07 | 6.99E−03 | N.B. | | | 1387.75 | 0.266 |
| SAD10320_P03_H07 | | N.B. | | | 411.64 | 0.134 |
| SAD10320_P03_C08 | 1.52E−02 | N.B. | | | 421.69 | 0.135 |
| SAD10320_P03_D08 | 1.94E−03 | N.B. | | | 453.40 | 0.140 |
| SAD10320_P03_F08 | 2.68E−03 | N.B. | | | 354.99 | 0.126 |
| SAD10320_P03_H08 | 1.50E−02 | N.B. | | | 715.32 | 0.175 |
| SAD10320_P03_A09 | 2.90E−03 | N.B. | | | 513.45 | 0.148 |
| SAD10320_P03_C09 | 5.10E−03 | N.B. | | | 426.08 | 0.136 |
| SAD10320_P03_F09 | 7.19E−03 | N.B. | | | 464.19 | 0.141 |
| SAD10320_P04_A10 | 1.44E−02 | N.B. | | | 442.99 | 0.138 |
| SAD10320_P04_C10 | 1.87E−02 | N.B. | | | 551.61 | 0.153 |
| SAD10320_P04_D10 | 1.71E−02 | N.B. | | | 410.79 | 0.134 |
| SAD10320_P04_E10 | 2.58E−03 | N.B. | | | 387.67 | 0.131 |
| SAD10320_P04_F10 | 2.39E−03 | N.B. | | | 556.30 | 0.153 |
| SAD10320_P04_G10 | 1.89E−02 | N.B. | | | 405.64 | 0.133 |
| SAD10320_P04_A11 | 7.41E−03 | N.B. | | | 6465.01 | 0.837 |
| SAD10320_P04_D11 | 3.38E−03 | N.B. | | | 441.27 | 0.138 |
| SAD10320_P04_E11 | 2.97E−03 | N.B. | | | 420.25 | 0.135 |
| SAD10320_P04_F11 | 1.92E−03 | N.B. | | | 358.95 | 0.127 |
| SAD10320_P04_G11 | 2.76E−03 | N.B. | | | 466.52 | 0.141 |
| SAD10320_P04_A12 | 1.68E−02 | N.B. | | | 438.81 | 0.138 |
| SAD10320_P04_D12 | 2.59E−03 | N.B. | | | 333.12 | 0.123 |
| SAD10320_P04_E12 | 1.08E−02 | N.B. | | | 419.76 | 0.135 |
| SAD10320_P04_F12 | 2.59E−03 | N.B. | | | 398.32 | 0.132 |
| SAD10319_P05_A01 | 2.51E−02 | N.B. | | | 4666.39 | 0.779 |
| SAD10319_P05_A02 | 2.46E−02 | N.B. | | | 1790.75 | 0.327 |
| SAD10319_P05_A03 | 1.27E−02 | N.B. | | | 7039.62 | 0.921 |
| SAD10319_P05_A05 | 1.18E−02 | N.B. | | | 4424.65 | 0.758 |
| SAD10319_P05_B02 | 4.11E−03 | N.B. | | | 2320.59 | 0.436 |
| SAD10319_P05_B03 | 3.46E−02 | N.B. | | | 3168.44 | 0.614 |
| SAD10319_P05_B04 | 2.58E−03 | N.B. | | | 1899.18 | 0.348 |
| SAD10319_P05_B05 | 6.54E−03 | N.B. | | | 1510.15 | 0.288 |
| SAD10319_P05_C01 | 1.30E−02 | N.B. | | | 2867.44 | 0.551 |
| SAD10319_P05_C03 | 3.27E−03 | N.B. | | | 2332.50 | 0.439 |
| SAD10319_P05_C05 | 8.21E−03 | N.B. | | | 10599.58 | 0.981 |
| SAD10319_P05_D01 | 9.29E−03 | N.B. | | | 867.37 | 0.200 |
| SAD10319_P05_D02 | 2.41E−02 | N.B. | | | 7439.59 | 0.935 |
| SAD10319_P05_D03 | 2.33E−02 | N.B. | | | 2514.09 | 0.477 |
| SAD10319_P05_D04 | 2.20E−02 | N.B. | | | 5563.17 | 0.847 |
| SAD10319_P05_D05 | 1.58E−02 | N.B. | | | 10322.46 | 0.979 |
| SAD10319_P05_E04 | 3.73E−03 | N.B. | | | 6664.59 | 0.907 |
| SAD10319_P05_F01 | 2.14E−02 | N.B. | | | 2559.09 | 0.486 |
| SAD10319_P05_G01 | 2.36E−02 | N.B. | | | 9442.16 | 0.972 |
| SAD10319_P05_G02 | 1.56E−02 | N.B. | | | 14061.28 | 0.989 |
| SAD10319_P05_G03 | 1.67E−02 | N.B. | | | 3988.13 | 0.718 |
| SAD10319_P05_G04 | 3.89E−03 | N.B. | | | 6306.93 | 0.890 |
| SAD10319_P05_H06 | 1.04E−02 | N.B. | | | 903.57 | 0.205 |
| SAD10319_P06_A07 | | N.B. | | | 9774.23 | 0.975 |
| SAD10319_P06_A10 | 2.46E−02 | N.B. | | | 5273.91 | 0.827 |
| SAD10319_P06_A11 | 2.79E−03 | N.B. | | | 4508.80 | 0.765 |
| SAD10319_P06_B10 | 2.00E−03 | N.B. | | | 4527.38 | 0.767 |
| SAD10319_P06_B11 | 1.01E−02 | N.B. | | | 2873.61 | 0.552 |
| SAD10319_P06_C10 | 3.18E−03 | N.B. | | | 4789.69 | 0.789 |
| SAD10319_P06_C12 | 7.56E−03 | N.B. | | | 8492.41 | 0.959 |
| SAD10319_P06_D12 | 1.92E−02 | N.B. | | | 682.94 | 0.174 |
| SAD10319_P06_E08 | 1.05E−02 | N.B. | | | 5829.53 | 0.864 |
| SAD10319_P06_E09 | 1.22E−02 | N.B. | | | 2799.30 | 0.537 |
| SAD10319_P06_E10 | 5.75E−03 | N.B. | | | 4760.14 | 0.787 |
| SAD10319_P06_F07 | 2.51E−02 | N.B. | | | 3893.41 | 0.709 |
| SAD10319_P06_F10 | 6.63E−03 | N.B. | | | 5273.02 | 0.827 |
| SAD10319_P06_G09 | 2.58E−03 | N.B. | | | 3588.20 | 0.679 |
| SAD10319_P06_G11 | 9.24E−03 | N.B. | | | 272.35 | 0.118 |
| SAD10319_P06_H07 | 9.01E−03 | N.B. | | | 9754.77 | 0.975 |
| SAD10319_P06_H08 | 2.31E−02 | N.B. | | | 3100.70 | 0.600 |
| SAD10319_P06_H10 | 2.67E−02 | N.B. | | | 8924.26 | 0.966 |
| SAD10319_P06_H11 | 2.85E−02 | N.B. | | | 235.23 | 0.113 |
| LAD9953_P01_H01 | 1.76E−02 | 8.67E−08 | 2.42E+05 | 2.09E−02 | 313.67 | 0.141 |
| LAD9954_P01_B02 | 3.03E−02 | 3.39E−08 | 3.16E+05 | 1.07E−02 | 174.62 | 0.109 |
| LAD9955_P01_G02 | 2.82E−02 | 1.27E−07 | 1.47E+05 | 1.87E−02 | 163.20 | 0.106 |
| LAD9956_P01_C03 | 9.13E−04 | N.B. | | | 5488.72 | 0.904 |
| LAD9959_P01_E04 | 1.74E−03 | 8.96E−08 | 2.10E+05 | 1.89E−02 | 473.64 | 0.178 |
| LAD9960_P01_D05 | | N.B. | | | 1266.36 | 0.356 |
| LAD9963_P01_E06 | 8.66E−04 | N.B. | | | 5377.02 | 0.898 |
| LAD9964_P01_C07 | 6.37E−04 | 4.71E−09 | 3.10E+05 | 1.46E−03 | 890.84 | 0.274 |
| LAD9966_P01_A08 | 3.50E−03 | N.B. | | | 110.57 | 0.044 |

TABLE 3
Cell Binding Data and Monovalent Equilibrium Dissociation Constants (Kds)

| | | Human CD3+ Jurkat | | | CHO-S | | K_{D} (nM) | | | |
|---|---|---|---|---|---|---|---|---|---|---|
| | | Cell Binding | | | Cell Binding | | for Human CD3 | | | |
| | | MFI | MFI | MFI pH 6.0/ | MFI | MFI | | | | |
| Clone # | ADI | pH 7.4 | pH 6.0 | MFI pH 7.4 | pH 7.4 | pH 6.0 | pH 6.0 | | pH 7.4 | |
| LAD5224_P03_A01 | ADI-26906 | 5273 | 6038 | 1.1 | 472 | 228 | 1.14 | nM | 2.74 | nM |
| SAD10318_P01_B01 | ADI-48574 | 150 | 3553 | 23.7 | 82 | 298 | 74.6 | nM | 24.2 | nM |
| SAD10318_P01_C01 | ADI-48575 | 81 | 3114 | 38.4 | 83 | 438 | 74.4 | nM | Non-binder | |
| SAD10318_P01_D01 | ADI-48576 | 42 | 849 | 20.1 | 93 | 276 | 76.0 | nM | Non-binder | |
| SAD10318_P01_E01 | ADI-48577 | 73 | 5372 | 73.1 | 84 | 291 | 116 | nM | Non-binder | |
| SAD10318_P01_F01 | ADI-48578 | 36 | 418 | 11.7 | 69 | 197 | 73.2 | nM | Non-binder | |
| SAD10318_P01_G01 | ADI-48579 | 306 | 2069 | 6.8 | 84 | 229 | 40.4 | nM | Non-binder | |
| SAD10318_P01_H01 | ADI-48580 | 41 | 933 | 22.5 | 81 | 1398 | 52.1 | nM | Non-binder | |
| SAD10318_P01_A02 | ADI-48581 | 38 | 1728 | 45.5 | 78 | 311 | 69.7 | nM | Non-binder | |
| SAD10318_P01_B02 | ADI-48582 | 36 | 326 | 9.0 | 74 | 321 | 48.4 | nM | Non-binder | |
| SAD10318_P01_C02 | ADI-48583 | 41 | 157 | 3.8 | 82 | 248 | 36.3 | nM | Non-binder | |
| SAD10318_P01_D02 | ADI-48584 | 91 | 2179 | 23.9 | 79 | 1585 | 61.6 | nM | Non-binder | |
| SAD10318_P01_F02 | ADI-48585 | 45 | 381 | 8.5 | 79 | 274 | 50.7 | nM | Non-binder | |
| SAD10318_P01_G02 | ADI-48586 | 45 | 1090 | 24.3 | 78 | 154 | 57.6 | nM | Non-binder | |
| SAD10318_P01_A03 | ADI-48587 | 66 | 5117 | 77.1 | 75 | 154 | 36.6 | nM | Non-binder | |
| SAD10318_P01_D03 | ADI-48588 | 59 | 4935 | 83.3 | 74 | 142 | 67.6 | nM | Non-binder | |
| SAD10318_P01_F03 | ADI-48589 | 475 | 5237 | 11.0 | 75 | 175 | 70.2 | nM | 131 | nM |
| SAD10318_P01_G03 | ADI-48590 | 32 | 1948 | 60.3 | 69 | 93 | 46.8 | nM | Non-binder | |
| SAD10318_P01_H03 | ADI-48591 | 140 | 4434 | 31.6 | 73 | 98 | 49.2 | nM | Non-binder | |
| SAD10318_P02_C04 | ADI-48592 | 2987 | 5807 | 1.9 | 83 | 339 | 23.5 | nM | 128 | nM |
| SAD10318_P02_G04 | ADI-48593 | 96 | 3785 | 39.4 | 73 | 398 | 53.7 | nM | Non-binder | |
| SAD10318_P02_H04 | ADI-48594 | 1319 | 4262 | 3.2 | 164 | 153 | 54.4 | nM | 77.0 | nM |
| SAD10318_P02_A05 | ADI-48595 | 4956 | 5984 | 1.2 | 117 | 247 | 1.56 | nM | 37.7 | nM |
| SAD10318_P02_B05 | ADI-48596 | 828 | 500 | 0.6 | 75 | 148 | 27.9 | nM | 102 | nM |
| SAD10318_P02_C05 | ADI-48597 | 61 | 1316 | 21.7 | 80 | 743 | 62.7 | nM | Non-binder | |
| SAD10318_P02_D05 | ADI-48598 | 33 | 279 | 8.6 | 69 | 316 | 36.9 | nM | Non-binder | |
| SAD10318_P02_H05 | ADI-48599 | 583 | 1319 | 2.3 | 79 | 273 | 28.7 | nM | 66.6 | nM |
| SAD10318_P02_G06 | ADI-48600 | 1337 | 2900 | 2.2 | 76 | 108 | 80.5 | nM | 82.1 | nM |
| SAD10318_P03_E07 | ADI-48601 | 52 | 1080 | 20.7 | 85 | 318 | 62.0 | nM | Non-binder | |
| SAD10318_P03_F07 | ADI-48602 | 34 | 202 | 5.9 | 78 | 459 | 33.4 | nM | Non-binder | |
| SAD10318_P03_C08 | ADI-48603 | 51 | 177 | 3.5 | 76 | 360 | 36.7 | nM | Non-binder | |
| SAD10318_P03_D08 | ADI-48604 | 43 | 199 | 4.7 | 77 | 219 | 27.5 | nM | Non-binder | |
| SAD10318_P03_E08 | ADI-48605 | 55 | 282 | 5.2 | 84 | 1566 | 50.7 | nM | Non-binder | |
| SAD10318_P03_F08 | ADI-48606 | 76 | 89 | 1.2 | 87 | 280 | 45.6 | nM | Non-binder | |
| SAD10318_P03_H08 | ADI-48607 | 52 | 86 | 1.7 | 76 | 204 | 30.4 | nM | Non-binder | |
| SAD10318_P03_A09 | ADI-48608 | 45 | 203 | 4.5 | 78 | 227 | 61.9 | nM | Non-binder | |
| SAD10318_P03_C09 | ADI-48609 | 37 | 346 | 9.3 | 76 | 267 | 39.2 | nM | Non-binder | |
| SAD10318_P03_D09 | ADI-48610 | 72 | 361 | 5.0 | 82 | 4056 | 33.1 | nM | Non-binder | |
| SAD10318_P03_E09 | ADI-48611 | 47 | 123 | 2.6 | 83 | 263 | 49.2 | nM | Non-binder | |
| SAD10318_P04_C10 | ADI-48612 | 50 | 42 | 0.8 | 76 | 157 | 34.1 | nM | Non-binder | |
| SAD10318_P04_D10 | ADI-48613 | 66 | 52 | 0.8 | 86 | 305 | 29.7 | nM | Non-binder | |
| SAD10318_P04_B11 | ADI-48614 | 58 | 148 | 2.6 | 86 | 302 | 35.5 | nM | Non-binder | |
| SAD10318_P04_C11 | ADI-48615 | 37 | 40 | 1.1 | 73 | 214 | 139 | nM | Non-binder | |
| SAD10318_P04_D11 | ADI-48616 | 41 | 36 | 0.9 | 73 | 159 | 29.9 | nM | Non-binder | |
| SAD10318_P04_H11 | ADI-48617 | 53 | 166 | 3.1 | 85 | 334 | 62.9 | nM | Non-binder | |
| SAD10318_P04_A12 | ADI-48618 | 41 | 170 | 4.2 | 78 | 2495 | 40.0 | nM | Non-binder | |
| SAD10319_P01_A01 | ADI-48619 | 129 | 1746 | 13.5 | 101 | 615 | 49.1 | nM | Non-binder | |
| SAD10319_P01_B01 | ADI-48620 | 28 | 191 | 6.9 | 140 | 130 | 30.3 | nM | Non-binder | |
| SAD10319_P01_C01 | ADI-48621 | 49 | 731 | 14.8 | 103 | 230 | 30.6 | nM | Non-binder | |
| SAD10319_P01_D01 | ADI-48622 | 567 | 3057 | 5.4 | 627 | 299 | 32.5 | nM | Non-binder | |
| SAD10319_P01_H01 | ADI-48623 | 147 | 1757 | 12.0 | 100 | 1276 | 40.5 | nM | Non-binder | |
| SAD10319_P01_F02 | ADI-48624 | 58 | 895 | 15.4 | 94 | 249 | 39.4 | nM | Non-binder | |
| SAD10319_P01_H02 | ADI-48625 | 128 | 1731 | 13.6 | 160 | 1003 | 45.2 | nM | Non-binder | |
| SAD10319_P01_C03 | ADI-48626 | 369 | 3163 | 8.6 | 286 | 272 | 36.9 | nM | Non-binder | |
| SAD10319_P01_F03 | ADI-48627 | 45 | 335 | 7.4 | 86 | 234 | 49.7 | nM | Non-binder | |
| SAD10319_P01_H03 | ADI-48628 | 132 | 1756 | 13.3 | 98 | 444 | 49.3 | nM | Non-binder | |
| SAD10319_P02_A05 | ADI-48629 | 499 | 1778 | 3.6 | 179 | 558 | 37.6 | nM | 427 | nM |
| SAD10319_P02_E05 | ADI-48630 | 5062 | 5540 | 1.1 | 78 | 129 | 23.9 | nM | 54.6 | nM |
| SAD10319_P02_D06 | ADI-48631 | 232 | 3105 | 13.4 | 115 | 650 | 31.8 | nM | 72.7 | nM |
| SAD10319_P02_G06 | ADI-48632 | 107 | 1620 | 15.1 | 106 | 499 | 31.0 | nM | Non-binder | |
| SAD10319_P02_H06 | ADI-48633 | 1448 | 2791 | 1.9 | 105 | 431 | 88.8 | nM | 79.9 | nM |
| SAD10319_P03_C07 | ADI-48634 | 44 | 651 | 14.7 | 80 | 283 | 42.7 | nM | Non-binder | |
| SAD10319_P03_E07 | ADI-48635 | 54 | 623 | 11.6 | 78 | 248 | 40.9 | nM | Non-binder | |
| SAD10319_P03_A08 | ADI-48636 | 35 | 897 | 25.9 | 95 | 190 | 36.4 | nM | Non-binder | |
| SAD10319_P03_E08 | ADI-48637 | 73 | 244 | 3.3 | 80 | 179 | 36.6 | nM | Non-binder | |
| SAD10319_P03_G08 | ADI-48638 | 84 | 1996 | 23.8 | 173 | 276 | 41.4 | nM | Non-binder | |
| SAD10319_P03_B09 | ADI-48639 | 55 | 897 | 16.5 | 74 | 149 | 112 | nM | Non-binder | |
| SAD10319_P03_E09 | ADI-48640 | 56 | 772 | 13.8 | 83 | 250 | 43.7 | nM | Non-binder | |
| SAD10319_P04_G11 | ADI-48641 | 52 | 59 | 1.1 | 84 | 145 | 800 | nM | Non-binder | |
| SAD10319_P04_E12 | ADI-48642 | 55 | 332 | 6.1 | 86 | 335 | 800 | nM | Non-binder | |
| SAD10320_P01_B01 | ADI-48643 | 265 | 4205 | 15.9 | 90 | 302 | 131 | nM | Non-binder | |
| SAD10320_P01_D01 | ADI-48644 | 124 | 860 | 6.9 | 70 | 159 | 30.5 | nM | Non-binder | |
| SAD10320_P01_E01 | ADI-48645 | 41 | 450 | 11.1 | 75 | 195 | 50.1 | nM | Non-binder | |
| SAD10320_P01_A02 | ADI-48646 | 53 | 1267 | 24.1 | 71 | 143 | 35.8 | nM | Non-binder | |
| SAD10320_P01_F03 | ADI-48647 | 141 | 4343 | 30.9 | 68 | 197 | 64.4 | nM | Non-binder | |
| SAD10320_P02_C04 | ADI-48648 | 5138 | 6163 | 1.2 | 94 | 201 | 0.978 | nM | 2.41 | nM |
| SAD10320_P02_E04 | ADI-48649 | 639 | 2315 | 3.6 | 75 | 200 | 253 | nM | Non-binder | |
| SAD10320_P02_D05 | ADI-48650 | 5429 | 6012 | 1.1 | 85 | 247 | 1.29 | nM | 31.7 | nM |
| SAD10320_P02_F05 | ADI-48651 | 4114 | 5625 | 1.4 | 80 | 243 | 34.5 | nM | 102 | nM |
| SAD10320_P02_H05 | ADI-48652 | 4760 | 5751 | 1.2 | 129 | 403 | 2.13 | nM | 59.2 | nM |
| SAD10320_P02_B06 | ADI-48653 | 1032 | 3107 | 3.0 | 84 | 163 | 41.2 | nM | 182 | nM |
| SAD10320_P02_C06 | ADI-48654 | 4888 | 5593 | 1.1 | 102 | 291 | 18.0 | nM | 68.1 | nM |
| SAD10320_P03_D09 | ADI-48655 | 581 | 1183 | 2.0 | 73 | 217 | 36.8 | nM | Non-binder | |
| SAD10320_P03_F09 | ADI-48656 | 38 | 185 | 4.9 | 72 | 268 | 34.7 | nM | Non-binder | |
| SAD10320_P04_E10 | ADI-48657 | 67 | 786 | 11.7 | 79 | 259 | 77.8 | nM | Non-binder | |
| SAD10320_P04_G10 | ADI-48658 | 316 | 113 | 0.4 | 84 | 253 | 34.7 | nM | Non-binder | |
| SAD10320_P04_H10 | ADI-48659 | 75 | 462 | 6.1 | 76 | 223 | 37.3 | nM | Non-binder | |
| SAD10320_P04_B11 | ADI-48660 | 41 | 81 | 2.0 | 80 | 207 | 42.9 | nM | Non-binder | |
| SAD10320_P04_C11 | ADI-48661 | 48 | 98 | 2.0 | 75 | 225 | 38.3 | nM | Non-binder | |
| SAD10320_P04_H11 | ADI-48662 | 44 | 81 | 1.8 | 78 | 252 | 10.9 | nM | Non-binder | |
| LAD9958_P01_A04 | ADI-48663 | 64 | 159 | 2.5 | 84 | 197 | 28.3 | nM | Non-binder | |
| LAD9961_P01_E05 | ADI-48664 | 198 | 452 | 2.3 | 111 | 238 | 32.8 | nM | 57.5 | nM |
| LAD9962_P01_A06 | ADI-48665 | 4898 | 5582 | 1.1 | 1842 | 2055 | 27.7 | nM | 106 | nM |
| LAD9965_P01_H07 | ADI-48666 | 4804 | 5698 | 1.2 | 131 | 168 | 16.4 | nM | 102 | nM |

| | | | | | | | | | |
|---|---|---|---|---|---|---|---|---|---|
| LAD5195_P02_E11 | ADI-26140 | 56 | 55 | 1.0 | 76 | 378 | 1000 | nM | Non-binder |

TABLE 4
Human and Cynomolgus CD3ε Sequences

| | | SEQ |
|---|---|---|
| Name | Sequence | ID NO: |
| Hu CD3ε | QDGNEEMGGITQTPYKVSISGTTVILTCPQYPGSE | 591 |
| Fc | ILWQHNDKNIGGDEDDKNIGSDEDHLSLKEFSEL | |
| | EQSGYYVCYPRGSKPEDANFYLYLRARVCENCM | |
| | EMDGGSDKTHTCPPCPAPELLGGPSVFLFPPKPK | |
| | DTLMISRTPEVTCVVVDVSHEDPEVKFNWYVDG | |
| | VEVHNAKTKPREEQYASTYRVVSVLTVLHQDW | |
| | LNGKEYKCKVSNKALPAPIEKTISKAKGQPREPQ | |
| | VYTLPPSRDELTKNQVSLTCLVKGFYPSDIAVEW | |
| | ESNGQPENNYKTTPPVLDSDGSFFLYSKLTVDKS | |
| | RWQQGNVFSCSVMHEALHNHYTQKSLSLSPGK | |
| Cy CD3ε | QDGNEEMGSITQTPYQVSISGTTVILTCSQHLGSE | 592 |
| Fc | AQWQHNGKNKEDSGDRLFLPEFSEMEQSGYYV | |
| | CYPRGSNPEDASHHLYLKARVCENCMEMDGGS | |
| | DKTHTCPPCPAPELLGGPSVFLFPPKPKDTLMISR | |
| | TPEVTCVVVDVSHEDPEVKFNWYVDGVEVHNA | |
| | KTKPREEQYASTYRVVSVLTVLHQDWLNGKEY | |
| | KCKVSNKALPAPIEKTISKAKGQPREPQVYTLPPS | |
| | RDELTKNQVSLTCLVKGFYPSDIAVEWESNGQPE | |
| | NNYKTTPPVLDSDGSFFLYSKLTVDKSRWQQGN | |
| | VFSCSVMHEALHNHYTQKSLSLSPGK | |

The application's sequence listing, which the Patent Office published only in electronic form, follows.

SEQUENCE LISTING (598 sequences)

SEQ ID NO: 1 - protein, 12 aa, Artificial Sequence
  Description of Artificial Sequence: Synthetic peptide
  MOD_RES (2)..(2): R or H
  MOD_RES (4)..(4): A or H
  MOD_RES (6)..(6): G, H or P
  MOD_RES (8)..(8): Y, H, D, V, E, S, N, L, M, I, G, A, Q or T
  See specification as filed for detailed description of substitutions and preferred embodiments
AXDXYXHXFYDV

SEQ ID NO: 2 - protein, 12 aa, Artificial Sequence
  Description of Artificial Sequence: Synthetic peptide
  MOD_RES (4)..(4): A or H
  MOD_RES (7)..(7): R or H
  MOD_RES (8)..(8): H or Y
  MOD_RES (9)..(9): F or H
  MOD_RES (12)..(12): H or V
  See specification as filed for detailed description of substitutions and preferred embodiments
ARDXYGXXXYDX

SEQ ID NO: 3 - protein, 12 aa, Artificial Sequence
  Description of Artificial Sequence: Synthetic peptide
  MOD_RES (6)..(6): G, E or R
  MOD_RES (7)..(7): R or H
  MOD_RES (9)..(9): F or H
  MOD_RES (10)..(10): Y or H
  MOD_RES (12)..(12): V or H
  See specification as filed for detailed description of substitutions and preferred embodiments
ARDAHXXYXXDX

SEQ ID NO: 4 - protein, 12 aa, Artificial Sequence
  Description of Artificial Sequence: Synthetic peptide
  MOD_RES (5)..(5): H, Y, S, G, A, T, V or R
  MOD_RES (8)..(8): Y or H
  See specification as filed for detailed description of substitutions and preferred embodiments
ARDAXHRXFYDV

SEQ ID NO: 5 - protein, 12 aa, Artificial Sequence
  Description of Artificial Sequence: Synthetic peptide
  MOD_RES (4)..(4): H or A
  MOD_RES (12)..(12): H, V or M
  See specification as filed for detailed description of substitutions and preferred embodiments
ARDXYHRYFYDX

SEQ ID NO: 6 - protein, 12 aa, Artificial Sequence
  Description of Artificial Sequence: Synthetic peptide
  MOD_RES (2)..(2): R or H
  MOD_RES (6)..(6): G or H
  MOD_RES (7)..(7): H or R
  MOD_RES (8)..(8): N, F or Y
  MOD_RES (10)..(10): Y or H
  See specification as filed for detailed description of substitutions and preferred embodiments
AXDAYXXXHXDV

SEQ ID NO: 7 - protein, 12 aa, Artificial Sequence
  Description of Artificial Sequence: Synthetic peptide
  MOD_RES (4)..(4): M, Q or H
  MOD_RES (5)..(5): R or H
  See specification as filed for detailed description of substitutions and preferred embodiments
ARDXXGRYFYDV

SEQ ID NO: 8 - protein, 12 aa, Artificial Sequence
  Description of Artificial Sequence: Synthetic peptide
  MOD_RES (4)..(4): H or A
  MOD_RES (5)..(5): T, Y or H
  MOD_RES (6)..(6): G or H
  MOD_RES (12)..(12): V or H
  See specification as filed for detailed description of substitutions and preferred embodiments
ARDXXXRYFYDX

SEQ ID NO: 9 - protein, 17 aa, Artificial Sequence
  Description of Artificial Sequence: Synthetic peptide
WIDLENANTIYDAKFQG

SEQ ID NO: 10 - protein, 17 aa, Artificial Sequence
  Description of Artificial Sequence: Synthetic peptide
  MOD_RES (1)..(1): W or Y
  MOD_RES (5)..(5): A, S, D, G, N, L, V, H or Q
  MOD_RES (8)..(8): A, T or S
  MOD_RES (10)..(10): K, V, T, D, Y, F or A
  See specification as filed for detailed description of substitutions and preferred embodiments
XINPXTGXTXYSQKFQG

SEQ ID NO: 11 - protein, 17 aa, Artificial Sequence
  Description of Artificial Sequence: Synthetic peptide
  MOD_RES (1)..(1): W, Y or F
  MOD_RES (3)..(3): T, N or D
  MOD_RES (8)..(8): A, T or L
  MOD_RES (10)..(10): A, K, V, H, T or N
  See specification as filed for detailed description of substitutions and preferred embodiments
XIXAGTGXTXYSQKFQG

SEQ ID NO: 12 - protein, 17 aa, Artificial Sequence
  Description of Artificial Sequence: Synthetic peptide
  MOD_RES (1)..(1): S or W
  MOD_RES (8)..(8): L, N, D or F
  MOD_RES (10)..(10): D, Y or K
  See specification as filed for detailed description of substitutions and preferred embodiments
XIDAGTGXTXYSQKFQG

SEQ ID NO: 13 - protein, 17 aa, Artificial Sequence
  Description of Artificial Sequence: Synthetic peptide
  MOD_RES (1)..(1): G, D or S
  MOD_RES (3)..(3): I or D
  MOD_RES (10)..(10): K or D
  See specification as filed for detailed description of substitutions and preferred embodiments
XIXAGTGATXYSQKFQG

SEQ ID NO: 14 - protein, 17 aa, Artificial Sequence
  Description of Artificial Sequence: Synthetic peptide
  MOD_RES (5)..(5): D, T, L, S or A
  MOD_RES (10)..(10): D, V, L or N
  See specification as filed for detailed description of substitutions and preferred embodiments
WINPXTGNTXYSQKFQG

SEQ ID NO: 15 - protein, 17 aa, Artificial Sequence
  Description of Artificial Sequence: Synthetic peptide
  MOD_RES (1)..(1): Y or W
  MOD_RES (8)..(8): N, D or A
  MOD_RES (10)..(10): I or V
  See specification as filed for detailed description of substitutions and preferred embodiments
XINAGTGXTXYSQKFQG

SEQ ID NO: 16 - protein, 17 aa, Artificial Sequence
  Description of Artificial Sequence: Synthetic peptide
  MOD_RES (1)..(1): W or Y
  MOD_RES (5)..(5): D, I or Y
  MOD_RES (8)..(8): D, Y or E
  See specification as filed for detailed description of substitutions and preferred embodiments
XINPXTGXTKYSQKFQG

SEQ ID NO: 17 - protein, 17 aa, Artificial Sequence
  Description of Artificial Sequence: Synthetic peptide
  MOD_RES (3)..(3): N or V
  MOD_RES (8)..(8): A or I
  See specification as filed for detailed description of substitutions and preferred embodiments
SIXAGTGXTKYSQKFQG

SEQ ID NO: 18 - protein, 17 aa, Artificial Sequence
  Description of Artificial Sequence: Synthetic peptide
  MOD_RES (8)..(8): F or N
  MOD_RES (10)..(10): Y or D
  See specification as filed for detailed description of substitutions and preferred embodiments
SINAGTGXTXYSQKFQG

SEQ ID NO: 19 - protein, 17 aa, Artificial Sequence
  Description of Artificial Sequence: Synthetic peptide
  MOD_RES (1)..(1): D or W
  MOD_RES (3)..(3): N or H
  MOD_RES (4)..(4): A or S
  MOD_RES (8)..(8): A or N
  See specification as filed for detailed description of substitutions and preferred embodiments
XIXXGTGXTDYSQKFQG

SEQ ID NO: 20 - protein, 17 aa, Artificial Sequence
  Description of Artificial Sequence: Synthetic peptide
  MOD_RES (5)..(5): N, H or Y
  MOD_RES (10)..(10): V or K
  See specification as filed for detailed description of substitutions and preferred embodiments
WIDPXTGATXYSQKFQG

SEQ ID NO: 21 - protein, 17 aa, Artificial Sequence
  Description of Artificial Sequence: Synthetic peptide
  MOD_RES (3)..(3): D or N
  MOD_RES (5)..(5): L, I or V
  See specification as filed for detailed description of substitutions and preferred embodiments
WIXPXTGNTKYSQKFQG

SEQ ID NO: 22 - protein, 17 aa, Artificial Sequence
  Description of Artificial Sequence: Synthetic peptide
SINAGDANTKYSQKFQG

SEQ ID NO: 23 - protein, 17 aa, Artificial Sequence
  Description of Artificial Sequence: Synthetic peptide
  MOD_RES (1)..(1): D or W
  MOD_RES (5)..(5): D or V
  MOD_RES (10)..(10): E or D
  See specification as filed for detailed description of substitutions and preferred embodiments
XIDPXTGATXYSQKFQG

SEQ ID NO: 24 - protein, 17 aa, Artificial Sequence
  Description of Artificial Sequence: Synthetic peptide
WINAGDAATVYSQKFQG

SEQ ID NO: 25 - protein, 9 aa, Artificial Sequence
  Description of Artificial Sequence: Synthetic peptide
FNIKDYHMH

SEQ ID NO: 26 - protein, 9 aa, Artificial Sequence
  Description of Artificial Sequence: Synthetic peptide
SNIKDYYMH

SEQ ID NO: 27 - protein, 9 aa, Artificial Sequence
  Description of Artificial Sequence: Synthetic peptide
SNIKDYHMH

SEQ ID NO: 28 - protein, 9 aa, Artificial Sequence
  Description of Artificial Sequence: Synthetic peptide
  MOD_RES (4)..(4): A, K, D, Q, E, N, T, L, Y, S, P, G, H or V
  MOD_RES (5)..(5): T, S or A
  MOD_RES (6)..(6): Y or I
  MOD_RES (7)..(7): A, D, N, S, Y, T, I, V, L, E, P, R or G
  See specification as filed for detailed description of substitutions and preferred embodiments
YTFXXXXMH

SEQ ID NO: 29 - protein, 9 aa, Artificial Sequence
  Description of Artificial Sequence: Synthetic peptide
  MOD_RES (4)..(4): T, D, A, N or V
  MOD_RES (5)..(5): D, E, G or Q
  MOD_RES (6)..(6): Y or D
  MOD_RES (7)..(7): D, A, E, N, S, Y or V
  See specification as filed for detailed description of substitutions and preferred embodiments
YTFXXXXMH

SEQ ID NO: 30 - protein, 9 aa, Artificial Sequence
  Description of Artificial Sequence: Synthetic peptide
  MOD_RES (6)..(6): A, D or T
  MOD_RES (7)..(7): D, F, A, M, V or Y
  See specification as filed for detailed description of substitutions and preferred embodiments
YTFTSXXMH

SEQ ID NO: 31 - protein, 9 aa, Artificial Sequence
  Description of Artificial Sequence: Synthetic peptide
  MOD_RES (4)..(4): Xaa can be Glu, Ser, Thr, or Asn (E, S, T or N)
  MOD_RES (5)..(5): Xaa can be Ser, Asp, Gln, or Asn (S, D, Q, or N)
  MOD_RES (7)..(7): Xaa can be Ala, Asp, Ser, or Thr (A, D, S, or T)
  See specification as filed for detailed description of substitutions and preferred embodiments
YTFXXYXMH

SEQ ID NO: 32 - protein, 9 aa, Artificial Sequence
  Description of Artificial Sequence: Synthetic peptide
  MOD_RES (4)..(4): I or N
  MOD_RES (5)..(5): K or R
  See specification as filed for detailed description of substitutions and preferred embodiments
YTFXXYVMH

SEQ ID NO: 33 - protein, 8 aa, Artificial Sequence
  Description of Artificial Sequence: Synthetic peptide
  MOD_RES (1)..(1): H, K or G
  MOD_RES (2)..(2): Q or H
  MOD_RES (4)..(4): Y or H
  MOD_RES (5)..(5): S, H, D, T, V, M or L
  MOD_RES (6)..(6): R or H
  MOD_RES (8)..(8): T or H
  See specification as filed for detailed description of substitutions and preferred embodiments
XXSXXXRX

SEQ ID NO: 34 - protein, 8 aa, Artificial Sequence
  Description of Artificial Sequence: Synthetic peptide
  MOD_RES (5)..(5): H, V, K, W, R, L, G, Y or Q
  MOD_RES (6)..(6): H, L, E, W, G, M, P, T, Q or V
  See specification as filed for detailed description of substitutions and preferred embodiments
KQSYXXRT

SEQ ID NO: 35 - protein, 8 aa, Artificial Sequence
  Description of Artificial Sequence: Synthetic peptide
  MOD_RES (1)..(1): K or H
  MOD_RES (4)..(4): H, Y, M, S, L, E, G or W
  MOD_RES (6)..(6): R or K
  See specification as filed for detailed description of substitutions and preferred embodiments
XQSXHXRT

SEQ ID NO: 36 - protein, 8 aa, Artificial Sequence
  Description of Artificial Sequence: Synthetic peptide
  MOD_RES (4)..(4): Y or H
  MOD_RES (5)..(5): Xaa can be Thr, Ser, Val, Lys, or Gln (T, S, V, K, or Q)
  MOD_RES (6)..(6): R or H
  See specification as filed for detailed description of substitutions and preferred embodiments
KQSXXXRT

SEQ ID NO: 37 - protein, 7 aa, Artificial Sequence
  Description of Artificial Sequence: Synthetic peptide
WASTRES

SEQ ID NO: 38 - protein, 17 aa, Artificial Sequence
  Description of Artificial Sequence: Synthetic peptide
  MOD_RES (8)..(8): N or H
  MOD_RES (9)..(9): A, R or T
  MOD_RES (10)..(10): R or H
  MOD_RES (11)..(11): T, P or E
  MOD_RES (13)..(13): H or K
  MOD_RES (15)..(15): H or Y
  See specification as filed for detailed description of substitutions and preferred embodiments
KSSQSLLXXXXGXNXLA

SEQ ID NO: 39 - protein, 17 aa, Artificial Sequence
  Description of Artificial Sequence: Synthetic peptide
  MOD_RES (8)..(8): N or H
  MOD_RES (10)..(10): R or H
  MOD_RES (13)..(13): K or H
  MOD_RES (15)..(15): Y or H
  See specification as filed for detailed description of substitutions and preferred embodiments
KSSQSLLXAXTHXNXLA

SEQ ID NO: 40 - protein, 17 aa, Artificial Sequence
  Description of Artificial Sequence: Synthetic peptide
KSSQSLLNASTAKNYLA

SEQ ID NO: 41 - protein, 17 aa, Artificial Sequence
  Description of Artificial Sequence: Synthetic peptide
KSSQSLLNARTRTNYLA

SEQ ID NO: 42 - protein, 17 aa, Artificial Sequence
  Description of Artificial Sequence: Synthetic peptide
  MOD_RES (9)..(9): S or A
  MOD_RES (10)..(10): R or H
  MOD_RES (11)..(11): E or T
  MOD_RES (13)..(13): H or K
  MOD_RES (15)..(15): H or Y
  See specification as filed for detailed description of substitutions and preferred embodiments
KSSQSLLNXXXGXNXLA

SEQ ID NO: 43 - protein, 12 aa, Artificial Sequence
  Description of Artificial Sequence: Synthetic peptide
  MOD_RES (4)..(4): H or A
  MOD_RES (5)..(5): T, Y or H
  MOD_RES (6)..(6): G or H
  MOD_RES (7)..(7): H, R, V or I
  MOD_RES (12)..(12): V or H
  See specification as filed for detailed description of substitutions and preferred embodiments
ARDXXXXYFYDX

SEQ ID NO: 44 - protein, 9 aa, Artificial Sequence
  Description of Artificial Sequence: Synthetic peptide
  MOD_RES (1)..(1): F or S
  MOD_RES (7)..(7): Y or H
  See specification as filed for detailed description of substitutions and preferred embodiments
XNIKDYXMH

SEQ ID NO: 45 - protein, 17 aa, Artificial Sequence
  Description of Artificial Sequence: Synthetic peptide
  MOD_RES (5)..(5): S, D, A, N, L or Q
  MOD_RES (10)..(10): V, T, D, Y or K
WINPXTGATXYSQKFQG

SEQ ID NO: 46 - protein, 17 aa, Artificial Sequence
  Description of Artificial Sequence: Synthetic peptide
  MOD_RES (1)..(1): W, S or D
  MOD_RES (10)..(10): A, H, K, T or D
XIDAGTGATXYSQKFQG

SEQ ID NO: 47 - protein, 9 aa, Artificial Sequence
  Description of Artificial Sequence: Synthetic peptide
FNIKDYYMH

SEQ ID NO: 48 - protein, 8 aa, Artificial Sequence
  Description of Artificial Sequence: Synthetic peptide
  MOD_RES (5)..(5): S, H, V, K, W, L, G, T, R or Q
  MOD_RES (6)..(6): H, R, L, K, E, W, G, M, T or V
KSQYXXRT

SEQ ID NO: 49 - protein, 17 aa, Artificial Sequence
  Description of Artificial Sequence: Synthetic peptide
KSSQSLLNARTGKNYLA

SEQ ID NO: 50 - protein, 17 aa, Artificial Sequence
  Description of Artificial Sequence: Synthetic peptide
  MOD_RES (3)..(3): T, N or D
  MOD_RES (10)..(10): V or K
WIXAGTGATXYSQKGQG

SEQ ID NO: 51 - protein, 9 aa, Artificial Sequence
  Description of Artificial Sequence: Synthetic peptide
  MOD_RES (4)..(4): T or A
  MOD_RES (5)..(5): E, D, A, S, G or Q
  MOD_RES (7)..(7): D, A, V or E
YTFXXYXMH

SEQ ID NO: 52 - protein, 8 aa, Artificial Sequence
  Description of Artificial Sequence: Synthetic peptide
  MOD_RES (4)..(4): H or Y
KQSXSRRT

SEQ ID NO: 53 - protein, 17 aa, Artificial Sequence
  Description of Artificial Sequence: Synthetic peptide
  MOD_RES (8)..(8): N or H
  MOD_RES (10)..(10): R or H
  MOD_RES (12)..(12): G or H
  MOD_RES (13)..(13): K or H
  MOD_RES (15)..(15): H or Y
KSSQSLLXAXTXXNXLA

SEQ ID NO: 54 - protein, 8 aa, Artificial Sequence
  Description of Artificial Sequence: Synthetic peptide
KQSYSRRT

SEQ ID NO: 55 - protein, 17 aa, Artificial Sequence
  Description of Artificial Sequence: Synthetic peptide
  MOD_RES (10)..(10): H or R
  MOD_RES (13)..(13): H or K
  MOD_RES (15)..(15): H or Y
KSSQSLLNAXTGXNXLA

SEQ ID NO: 56 - protein, 28 aa, Artificial Sequence
  Description of Artificial Sequence: Synthetic peptide
  MOD_RES (28)..(28): Lys/SCBiot(dPEG4)
  C-term amide
QDGNEEMGSITQTPYQVSISGTTVILTK

SEQ ID NO: 57 - protein, 14 aa, Artificial Sequence
  Description of Artificial Sequence: Synthetic peptide
  MOD_RES (14)..(14): Lys/SCBiot(dPEG4)
  C-term amide
QDGNEEMGGITQTK

SEQ ID NO: 58 - protein, 12 aa, Artificial Sequence
  Description of Artificial Sequence: Synthetic peptide
  MOD_RES (2)..(2): R or H
  MOD_RES (4)..(4): A, H, M or Q
  MOD_RES (5)..(5): Y, H, S, G, A, T, V or R
  MOD_RES (6)..(6): G, H, P, E, R
  MOD_RES (7)..(7): H or R
  MOD_RES (8)..(8): Y, N, F, H, D, E, S, L, M, I, G, A, Q or T
  MOD_RES (9)..(9): F or H
  MOD_RES (10)..(10): Y or H
  MOD_RES (12)..(12): V, H or M
  See specification as filed for detailed description of substitutions and preferred embodiments
AXDXXXXXXXDX

SEQ ID NO: 59 - protein, 17 aa, Artificial Sequence
  Description of Artificial Sequence: Synthetic peptide
  MOD_RES (1)..(1): W, S, Y, F, G or D
  MOD_RES (3)..(3): N, T, D, V or H
  MOD_RES (4)..(4): A, P or S
  MOD_RES (5)..(5): G, A, S, N, D, L, V, H, Q, T, I or Y
  MOD_RES (6)..(6): D or T
  MOD_RES (7)..(7): A or G
  MOD_RES (8)..(8): A, N, T, S, L, D, F, Y or E
  MOD_RES (10)..(10): V, K, T, D, Y, F, A, H, N, L, I or E
  See specification as filed for detailed description of substitutions and preferred embodiments
XIXXXXXXTXYSQKFQG

SEQ ID NO: 60 - protein, 119 aa, Artificial Sequence
  Description of Artificial Sequence: Synthetic polypeptide
QVQLVQSGAEVKKPGASVKVSCKASGFNIKDYYMHWVRQAPGQRLEWMGWIDLENANTIYDAKFQGRVTITRDTSASTAYMELSSLRSEDTAVYYCARDAYGRYFYDVWGQGTLVTVSS

SEQ ID NO: 61 - protein, 112 aa, Artificial Sequence
  Description of Artificial Sequence: Synthetic polypeptide
DIVMTQSPDSLAVSLGERATINCKSSQSLLNARTGKNYLAWYQQKPGQPPKLLIYWASTRESGVPDRFSGSGSGTDFTLTISSLQAEDVAVYYCKQSYSRRTFGGGTKVEIK

SEQ ID NO: 62 - protein, 119 aa, Artificial Sequence
  Description of Artificial Sequence: Synthetic polypeptide
QVQLVQSGAEVKKPGASVKVSCKASGFNIKDYYMHWVRQAPGQRLEWMGWIDLENANTIYDAKFQGRVTITRDTSASTAYMELSSLRSEDTAVYYCARDAYGRYHYDHWGQGTLVTVSS

SEQ ID NO: 63 - protein, 112 aa, Artificial Sequence
  Description of Artificial Sequence: Synthetic polypeptide
DIVMTQSPDSLAVSLGERATINCKSSQSLLNAHTGHNYLAWYQQKPGQPPKLLIYWASTRESGVPDRFSGSGSGTDFTLTISSLQAEDVAVYYCKQSYSRRTFGGGTKVEIK

SEQ ID NO: 64 - protein, 119 aa, Artificial Sequence
  Description of Artificial Sequence: Synthetic polypeptide
QVQLVQSGAEVKKPGASVKVSCKASGFNIKDYYMHWVRQAPGQRLEWMGWIDLENANTIYDAKFQGRVTITRDTSASTAYMELSSLRSEDTAVYYCARDAHHRYFYDVWGQGTLVTVSS

SEQ ID NO: 65 - protein, 112 aa, Artificial Sequence
  Description of Artificial Sequence: Synthetic polypeptide
DIVMTQSPDSLAVSLGERATINCKSSQSLLNARTGKNHLAWYQQKPGQPPKLLIYWASTRESGVPDRFSGSGSGTDFTLTISSLQAEDVAVYYCKQSHSHRTFGGGTKVEIK

SEQ ID NO: 66 - protein, 119 aa, Artificial Sequence
  Description of Artificial Sequence: Synthetic polypeptide
QVQLVQSGAEVKKPGASVKVSCKASGYTFDSYIMHWVRQAPGQRLEWMGWIDAGTGATVYSQKFQGRVTITRDTSASTAYMELSSLRSEDTAVYYCARDAYGHYFYDHWGQGTLVTVSS

SEQ ID NO: 67 - protein, 112 aa, Artificial Sequence; identical to SEQ ID NO: 61
  Description of Artificial Sequence: Synthetic polypeptide

SEQ ID NO: 68 - protein, 119 aa, Artificial Sequence
  Description of Artificial Sequence: Synthetic polypeptide
QVQLVQSGAEVKKPGASVKVSCKASGYTFNNYAMHWVRQAPGQRLEWMGWIDAGTGNTDYSQKFQGRVTITRDTSASTAYMELSSLRSEDTAVYYCARDAHHRYFYDVWGQGTLVTVSS

SEQ ID NO: 69 - protein, 112 aa, Artificial Sequence; identical to SEQ ID NO: 61
  Description of Artificial Sequence: Synthetic polypeptide

SEQ ID NO: 70 - protein, 119 aa, Artificial Sequence
  Description of Artificial Sequence: Synthetic polypeptide
QVQLVQSGAEVKKPGASVKVSCKASGYTFTQYTMHWVRQAPGQRLEWMGSIDAGTGATKYSQKFQGRVTITRDTSASTAYMELSSLRSEDTAVYYCARDAYHHYFYDVWGQGTLVTVSS

SEQ ID NO: 71 - protein, 112 aa, Artificial Sequence; identical to SEQ ID NO: 61
  Description of Artificial Sequence: Synthetic polypeptide

SEQ ID NO: 72 - protein, 119 aa, Artificial Sequence
  Description of Artificial Sequence: Synthetic polypeptide
QVQLVQSGAEVKKPGASVKVSCKASGYTFTQYSMHWVRQAPGQRLEWMGWINAGTGDTVYSQKFQGRVTITRDTSASTAYMELSSLRSEDTAVYYCARDHHGRYFYDVWGQGTLVTVSS

SEQ ID NO: 73 - protein, 112 aa, Artificial Sequence
  Description of Artificial Sequence: Synthetic polypeptide
DIVMTQSPDSLAVSLGERATINCKSSQSLFNARTGKNYLAWYQQKPGQPPKLLIYWASTRESGVPDRFSGSGSGTDFTLTISSLQAEDVAVYYCKQSYSRRTFGGGTKVEIK

SEQ ID NO: 74 - protein, 119 aa, Artificial Sequence
  Description of Artificial Sequence: Synthetic polypeptide
QVQLVQSGAEVKKPGASVKVSCKASGYTFDAYAMHWVRQAPGQRLEWMGWIDAGTGATKYSQKFQGRVTITRDTSASTAYMELSSLRSEDTAVYYCARDHYGHYFYDVWGQGTLVTVSS

SEQ ID NO: 75 - protein, 112 aa, Artificial Sequence; identical to SEQ ID NO: 61
  Description of Artificial Sequence: Synthetic polypeptide

SEQ ID NO: 76 - protein, 119 aa, Artificial Sequence
  Description of Artificial Sequence: Synthetic polypeptide
QVQLVQSGAEVKKPGASVKVSCKASGYTFTSYTMHWVRQAPGQRPEWMGSINAGTGFTDYSQKFQGRVTITRDTSASTAYMELSSLRSEDTAVYYCARDHYGHYFYDVWGQGTLVTVSS

SEQ ID NO: 77 - protein, 112 aa, Artificial Sequence; identical to SEQ ID NO: 61
  Description of Artificial Sequence: Synthetic polypeptide

SEQ ID NO: 78 - protein, 119 aa, Artificial Sequence
  Description of Artificial Sequence: Synthetic polypeptide
QVQLVQSGAEVKKPGASVKVSCKASGYTFTSYAMHWVRQAPGQRLEWMGWINPVTGATVYSQKFQGRVTITRDTSASTAYMELSSLRSEDTAVYYCARDAYGHYFYDVWGQGTLVTVSS

SEQ ID NO: 79 - protein, 112 aa, Artificial Sequence; identical to SEQ ID NO: 61
  Description of Artificial Sequence: Synthetic polypeptide

SEQ ID NO: 80 - protein, 119 aa, Artificial Sequence
  Description of Artificial Sequence: Synthetic polypeptide
QVQLVQSGAEVKKPGASVKVSCKASGYTFTDYAMHWVRQAPGQRLEWMGWINAGTGATIYSQKFQGRVTITRDTSASTAYMELSSLRSEDTAVYYCARDAYHHYFYDVWGQGTLVTVSS

SEQ ID NO: 81 - protein, 112 aa, Artificial Sequence; identical to SEQ ID NO: 61
  Description of Artificial Sequence: Synthetic polypeptide

SEQ ID NO: 82 - protein, 119 aa, Artificial Sequence
  Description of Artificial Sequence: Synthetic polypeptide
QVQLVQSGAEVKKPGASVKVSCKASGYTFADYAMHWVRQAPGQRLAWMGWINPHTGATFYSQKFQGRVTITRDTSASTAYMELSSLRSEDTAVYYCARDAYGRYFYDHWGQGTLVTVSS

SEQ ID NO: 83 - protein, 112 aa, Artificial Sequence; identical to SEQ ID NO: 61
  Description of Artificial Sequence: Synthetic polypeptide

SEQ ID NO: 84 - protein, 119 aa, Artificial Sequence
  Description of Artificial Sequence: Synthetic polypeptide
QVQLVQSGAEVKKPGASVKVSCKASGYTFLSYAMHWVRQAPGQRLERMGWINPSTGATDYSQKFQGRVTITRDTSASTAYMELSSLRSEDTAVYYCARDAYGHYFYDVWGQGTLVTVSS

SEQ ID NO: 85 - protein, 112 aa, Artificial Sequence; identical to SEQ ID NO: 61
  Description of Artificial Sequence: Synthetic polypeptide

SEQ ID NO: 86 - protein, 119 aa, Artificial Sequence
  Description of Artificial Sequence: Synthetic polypeptide
QVQLVQSGAEVKKPGASVKVSCKASGFNIKDYYMHWVRQAPGQRLEWMGWIDLENANTIYDAKFQGRVTITRDTSASTAYMELSSLRSEDTAVYYCARDAHGHYFYDVWGQGTLVTVSS

SEQ ID NO: 87 - protein, 112 aa, Artificial Sequence
  Description of Artificial Sequence: Synthetic polypeptide
DIVMTQSPDSLAVSLGERATINCKSSQSLLNAHTGKNHLAWYQQKPGQPPKLLIYWASTRESGVPDRFSGSGSGTDFTLTISSLQAEDVAVYYCKQSHSHRTFGGGTKVEIK

SEQ ID NO: 88 - protein, 119 aa, Artificial Sequence
  Description of Artificial Sequence: Synthetic polypeptide
QVQLVQSGAEVKKPGASVKVSCKASGYTFTSYAMHWVRQAPGQRLEWMGWINPDTGATVYSQKFQGRVTITRDTSASTAYMELSSLRSEDTAVYYCARDAYHHYFYDVWGQGTLVTVSS

SEQ ID NO: 89 - protein, 112 aa, Artificial Sequence; identical to SEQ ID NO: 61
  Description of Artificial Sequence: Synthetic polypeptide

SEQ ID NO: 90 - protein, 119 aa, Artificial Sequence
  Description of Artificial Sequence: Synthetic polypeptide
QVQLVQSGAEVKKPGASVKVSCKASGYTFTAYVMHWVRQAPGQRLEWMGSIDAGTGNTKYSQKFQGRVTITRDTSASTAYMELSSLRSEDTAVYYCARDAYGHYFYDHWGQGTLVTVSS

SEQ ID NO: 91 - protein, 112 aa, Artificial Sequence; identical to SEQ ID NO: 61
  Description of Artificial Sequence: Synthetic polypeptide

SEQ ID NO: 92 - protein, 119 aa, Artificial Sequence
  Description of Artificial Sequence: Synthetic polypeptide
QVQLVQSGAEVKKPGASVKVSCKASGYTFESYDMHWVRQAPGQRLEWMGWIDAGTGATTYSQKFQGRVTITRDTSASTAYMELSSLRSEDTAVYYCARDAYHHYFYDVWGQGTLVTVSS

SEQ ID NO: 93 - protein, 112 aa, Artificial Sequence; identical to SEQ ID NO: 61
  Description of Artificial Sequence: Synthetic polypeptide

SEQ ID NO: 94 - protein, 119 aa, Artificial Sequence
  Description of Artificial Sequence: Synthetic polypeptide
QVQLVQSGAEVKKPGASVKVSCKASGYTFDSYLMHWVRQAPGQRLEWMGWIDAGTGATNYSQKFQGRVTITRDTSASTAYMELSSLRSEDTAVYYCARDAHGHYFYDVWGQGTLVTVSS

SEQ ID NO: 95 - protein, 112 aa, Artificial Sequence; identical to SEQ ID NO: 61
  Description of Artificial Sequence: Synthetic polypeptide

SEQ ID NO: 96 - protein, 119 aa, Artificial Sequence
  Description of Artificial Sequence: Synthetic polypeptide
QVQLVQSGAEVKKPGASVKVSCKASGYTFNSYDMHWVRQAPGQRLEWMGWINPYTGETKYSQKFQGRVTITRDTSASTAYMELSSLRSEDTAVYYCARDHYGHYFYDVWGQGTLVTVSS

SEQ ID NO: 97 - protein, 112 aa, Artificial Sequence; identical to SEQ ID NO: 61
  Description of Artificial Sequence: Synthetic polypeptide

SEQ ID NO: 98 - protein, 119 aa, Artificial Sequence
  Description of Artificial Sequence: Synthetic polypeptide
QVQLVQSGAEVKKPGASVKVSCKASGYTFYSYEMHWVRQAPGQRLDWMGWINPQTGATKYSQKFQGRVTITRDTSASTAYMELSSLRSEDTAVYYCARDAYHHYFYDVWGQGTLVTVSS

SEQ ID NO: 99 - protein, 112 aa, Artificial Sequence; identical to SEQ ID NO: 61
  Description of Artificial Sequence: Synthetic polypeptide

SEQ ID NO: 100 - protein, 118 aa, Artificial Sequence
  Description of Artificial Sequence: Synthetic polypeptide
QVQLVQSGAEVKKPGASVKVSCKASGYTFNDYAMHWVRQAPGQRLEWMGYINGTGATVYSQKFQGRVTITRDTSASTAYMELSSLRSEDTAVYYCARDAYHHYFYDVWSQGTLVTVSS

SEQ ID NO: 101 - protein, 112 aa, Artificial Sequence; identical to SEQ ID NO: 61
  Description of Artificial Sequence: Synthetic polypeptide

SEQ ID NO: 102 - protein, 119 aa, Artificial Sequence
  Description of Artificial Sequence: Synthetic polypeptide
QVQLVQSGAEVKKPGASVKVSCKASGYTFSSYDMHWVRQAPGQRLEWMGWIDAGTGFTKYSQKFQGRVTITRDTSASTAYMELSSLRSEDTAVYYCARDAYGHYFYDHWGQGTLVTVSS

SEQ ID NO: 103 - protein, 112 aa, Artificial Sequence; identical to SEQ ID NO: 61
  Description of Artificial Sequence: Synthetic polypeptide

SEQ ID NO: 104 - protein, 119 aa, Artificial Sequence
  Description of Artificial Sequence: Synthetic polypeptide
QVQLVQSGAEVKKPGASVKVSCKASGYTFKSYDMHWVRQAPGQRPEWMGWINAGTGNTVYSQKFQGRVTITRDTSASTAYMELSSLRSEDTAVYYCARDAYHRYFYDVWGQGTLVTVSS

SEQ ID NO: 105 - protein, 112 aa, Artificial Sequence; identical to SEQ ID NO: 61
  Description of Artificial Sequence: Synthetic polypeptide

SEQ ID NO: 106 - protein, 119 aa, Artificial Sequence
  Description of Artificial Sequence: Synthetic polypeptide
QVQLVQSGAEVKKPGASVKVSCKASGYTFTEYDMHWVRQAPGQRLEWMGWIDAGTGATVYSQKFQGRVTITRDTSASTAYMELSSLRSEDTAVYYCARDAYGRYFYDHWGQGTLVTVSS

SEQ ID NO: 107 - protein, 112 aa, Artificial Sequence; identical to SEQ ID NO: 61
  Description of Artificial Sequence: Synthetic polypeptide

SEQ ID NO: 108 - protein, 119 aa, Artificial Sequence
  Description of Artificial Sequence: Synthetic polypeptide
QVQLVQSGAEVKKPGASVKVSCKASGFNIKDYYMHWVRQAPGQRLEWMGWIDLENANTIYDAKFQGRVTITRDTSASTAYMELSSLRSEDTAVYYCARDAYHHYFYDVWGQGTLVTVSS

SEQ ID NO: 109 - protein, 112 aa, Artificial Sequence
  Description of Artificial Sequence: Synthetic polypeptide
DIVMTQSPDSLAVSLGERATINCKSSQSLLNARTGKNHLAWYQQKPGQPPKLLIYWASTRESGVPDRFSGSGSGTDFTLTISSLQAEDVAVYYCKQSYSHRTFGGGTKVEIK

SEQ ID NO: 110 - protein, 119 aa, Artificial Sequence
  Description of Artificial Sequence: Synthetic polypeptide
QVQLVQSGAEVKKPGASVKVSCKASGYTFLSYDMHWVRQAPGQRLEWMGWIDAGTGATTYSQKFQGRVTITRDTSASTAYMELSSLRSEDTAVYYCARDAYHHYFYDVWGQGTLVTVSS

SEQ ID NO: 111 - protein, 112 aa, Artificial Sequence; identical to SEQ ID NO: 61
  Description of Artificial Sequence: Synthetic polypeptide

SEQ ID NO: 112 - protein, 119 aa, Artificial Sequence
  Description of Artificial Sequence: Synthetic polypeptide
QVQLVQSGAEVKKPGASVKVSCKASGYTFPSYPMHWVRQAPGQRLDWMGWINPDTGATVYSQKFQGRVTITRDTSASTAYMELSSLRSEDTAVYYCARDAYHHYFYDVWGQGTLVTVSS

SEQ ID NO: 113 - protein, 112 aa, Artificial Sequence
  Description of Artificial Sequence: Synthetic polypeptide
DIVMTQSPDSLAVSLGERATINCKSSQSPLNARTGKNYLAWYQQKPGQPPKLLIYWASTRESGVPDRFSGSGSGTDFTLTISSLQAEDVAVYYCKQSYSRRTFGGGTKVEIK

SEQ ID NO: 114 - protein, 119 aa, Artificial Sequence
  Description of Artificial Sequence: Synthetic polypeptide
QVQLVQSGAEVKKPGASVKVSCKASGYTFTSYDMHWVRQAPGQRLEWMGWIDPHTGATKYSQKFQGRVTITRDTSASTAYMELSSLRSEDTAVYYCARDAYGRYFYDHWGQGTLVTVSS

SEQ ID NO: 115 - protein, 112 aa, Artificial Sequence; identical to SEQ ID NO: 61
  Description of Artificial Sequence: Synthetic polypeptide

SEQ ID NO: 116 - protein, 119 aa, Artificial Sequence
  Description of Artificial Sequence: Synthetic polypeptide
QVQLVQSGAEVKKPGASVKVSCKASGYTFTSDAMHWVRQAPGQRLAWMGYINAGTGTTKYSQKFQGRVTITRDTSASTAYMELSSLRSEDTAVYYCAHDAYGHYFYDVWGQGTLVTVSS

SEQ ID NO: 117 - protein, 112 aa, Artificial Sequence; identical to SEQ ID NO: 61
  Description of Artificial Sequence: Synthetic polypeptide

SEQ ID NO: 118 - protein, 119 aa, Artificial Sequence
  Description of Artificial Sequence: Synthetic polypeptide
QVQLVQSGAEVKKPGASVKVSCKASGYTFTSTFMHWVRQAPGQRLEWMGFIDAGTGATKYSQKFQGRVTITRDTSASTAYMELSSLRSEDTAVYYCARDAYGHYFYDHWGQGTLVTVSS

SEQ ID NO: 119 - protein, 112 aa, Artificial Sequence; identical to SEQ ID NO: 61
  Description of Artificial Sequence: Synthetic polypeptide

SEQ ID NO: 120 - protein, 119 aa, Artificial Sequence
  Description of Artificial Sequence: Synthetic polypeptide
QVQLVQSGAEVKKPGASVKVSCKASGYTFTDYSMHWVRQAPGQRLEWMGSINAGTGITKYSQKFQGRVTITRDTSASTAYMELSSLRSEDTAVYYCARDAHGRYFYDVWGQGTLVTVSS

SEQ ID NO: 121 - protein, 112 aa, Artificial Sequence; identical to SEQ ID NO: 61
  Description of Artificial Sequence: Synthetic polypeptide

SEQ ID NO: 122 - protein, 119 aa, Artificial Sequence
  Description of Artificial Sequence: Synthetic polypeptide
QVQLVQSGAEVKKPGASVKVSCKASGYTFTDYYMHWVRQAPGQRLEWMGWINPATGATAYSQKFQGRVTITRDTSASTAYMELSSLRSEDTAVYYCARDAYGHHFYDVWGQGTLVTVSS

SEQ ID NO: 123 - protein, 112 aa, Artificial Sequence; identical to SEQ ID NO: 61
  Description of Artificial Sequence: Synthetic polypeptide

SEQ ID NO: 124 - protein, 119 aa, Artificial Sequence
  Description of Artificial Sequence: Synthetic polypeptide
QVQLVQSGAEVKKPGASVKVSCKASGYTFGSYDMHWVRQAPGQRLEWMGWIDAGTGATKYSQKFQGRVTITRDTSASTAYMELSSLRSEDTAVYYCARDAHGHYFYDVWGQGTLVTVSS

SEQ ID NO: 125 - protein, 112 aa, Artificial Sequence; identical to SEQ ID NO: 61
  Description of Artificial Sequence: Synthetic polypeptide

SEQ ID NO: 126 - protein, 119 aa, Artificial Sequence
  Description of Artificial Sequence: Synthetic polypeptide
QVQLVQSGAEVKKPGASVKVSCKASGYTFHSYEMHWVRQAPGQRLEWMGWINPSTGSTKYSQKFQGRVTITRDTSASTAYMELSSLRSEDTAVYYCARDAYGRYFYDHWGQGTLVTVSS

SEQ ID NO: 127 - protein, 112 aa, Artificial Sequence; identical to SEQ ID NO: 61
  Description of Artificial Sequence: Synthetic polypeptide

SEQ ID NO: 128 - protein, 119 aa, Artificial Sequence
  Description of Artificial Sequence: Synthetic polypeptide
QVQLVQSGAEVKKPGASVKVSCKASGYTFNSYRMHWVRQAPGQRLEWMGSIDAGTGNTKYSQKFQGRVTITRDTSASTAYMELSSLRSEDTAVYYCARDAYGRYFYDHWGQGTLVTVSS

SEQ ID NO: 129 - protein, 112 aa, Artificial Sequence; identical to SEQ ID NO: 61
  Description of Artificial Sequence: Synthetic polypeptide

SEQ ID NO: 130 - protein, 119 aa, Artificial Sequence
  Description of Artificial Sequence: Synthetic polypeptide
QVQLVQSGAEVKKPGASVKVSCKASGFNIKDYYMHWVRQAPGQRLEWMGWIDLENANTIYDAKFQGRVTITRDTSASTAYMELSSLRSEDTAVYYCARDHYHRYFYDVWGQGTLVTVSS

SEQ ID NO: 131 - protein, 112 aa, Artificial Sequence
  Description of Artificial Sequence: Synthetic polypeptide
DIVMTQSPDSLAVSLGERATINCKSSQSLLNARTGHNYLAWYQQKPGQPPKLLIYWASTRESGVPDRFSGSGSGTDFTLTISSLQAEDVAVYYCKQSHSHRTFGGGTKVEIK

SEQ ID NO: 132 - protein, 119 aa, Artificial Sequence
  Description of Artificial Sequence: Synthetic polypeptide
QVQLVQSGAEVKKPGASVKVSCKASGYTFTDYNMHWVRQAPGQRLEWMGWINPYTGYTKYSQKFQGRVTITRDTSASTAYMELSSLRSEDTAVYYCARDHYGHYFYDVWGQGTLVTVSS

SEQ ID NO: 133 - protein, 112 aa, Artificial Sequence; identical to SEQ ID NO: 61
  Description of Artificial Sequence: Synthetic polypeptide

SEQ ID NO: 134 - protein, 119 aa, Artificial Sequence
  Description of Artificial Sequence: Synthetic polypeptide
QVQLVQSGAEVKKPGASVKVSCKASGYTFTDYNMHWVRQAPGQRLQWMGWINPYTGYTKYSQKFQGRVTITRDTSASTAYMELSSLRSEDTAVYYCARDHYGHYFYDVWGQGTLVTVSS

SEQ ID NO: 135 - protein, 112 aa, Artificial Sequence; identical to SEQ ID NO: 61
  Description of Artificial Sequence: Synthetic polypeptide

SEQ ID NO: 136 - protein, 119 aa, Artificial Sequence
  Description of Artificial Sequence: Synthetic polypeptide
QVQLVQSGAEVKKPGASVKVYCKASGYTFTTYEMHWVRQAPGQRLEWMGSINAGDANTKYSQKFQGRVTITRDTSASTAYMELSSLRSEDTAVYYCARDAYHHYFYDVWGQGTLVTVSS

SEQ ID NO: 137 - protein, 112 aa, Artificial Sequence; identical to SEQ ID NO: 61
  Description of Artificial Sequence: Synthetic polypeptide

SEQ ID NO: 138 - protein, 119 aa, Artificial Sequence
  Description of Artificial Sequence: Synthetic polypeptide
QVQLVQSGAEVKKPGASVKVSCKASGYTFTSYAMHWVRQAPGQRLEWMGWINPITGYTKYSQKFQGRVTITRDTSASTAYMELSSLRSEDTAVYYCARDAHGRYHYDVWGQGTLVTVSS

SEQ ID NO: 139 - protein, 112 aa, Artificial Sequence; identical to SEQ ID NO: 61
  Description of Artificial Sequence: Synthetic polypeptide

SEQ ID NO: 140 - protein, 119 aa, Artificial Sequence
  Description of Artificial Sequence: Synthetic polypeptide
QVQLVQSGAEVKKPGASVKVSCKASGYTFTAYDMHWVRQAPGQRLERMGWIDPITGNTKYSQKFQGRVTITRDTSASTAYMELSSLRSEDTAVYYCAHDAYGHYFYDVWGQGTLVTVSS

SEQ ID NO: 141 - protein, 112 aa, Artificial Sequence; identical to SEQ ID NO: 61
  Description of Artificial Sequence: Synthetic polypeptide

SEQ ID NO: 142 - protein, 119 aa, Artificial Sequence
  Description of Artificial Sequence: Synthetic polypeptide
QVQLVQSGAEVKKPGASVKVSCKASGYTFTSYAMHWVRQAPGQRLDWMGYINPDTGDTKYSQKFQGRVTITRDTSASTAYMELSSLRSEDTAVYYCARDAYHHYFYDVWGQGTLVTVSS

SEQ ID NO: 143 - protein, 112 aa, Artificial Sequence; identical to SEQ ID NO: 61
  Description of Artificial Sequence: Synthetic polypeptide

SEQ ID NO: 144 - protein, 119 aa, Artificial Sequence
  Description of Artificial Sequence: Synthetic polypeptide
QVQLVQSGAEVKKPGASVKVSCKASGYTFTSYPMHWVRQAPGQRLEWMGWIDAGTGLTTYSQKFQGRVTITRDTSASTAYMELSSLRSEDTAVYYCARDHYHRYFYDMWGQGTLVTVSS

SEQ ID NO: 145 - protein, 112 aa, Artificial Sequence; identical to SEQ ID NO: 61
  Description of Artificial Sequence: Synthetic polypeptide

SEQ ID NO: 146 - protein, 119 aa, Artificial Sequence
  Description of Artificial Sequence: Synthetic polypeptide
QVQLVQSGAEVKKPGASVKVSCKASGYTFNDYAMHWVRQAPGQRLDWMGWINPDTGNTNYSQKFQGRVTITRDTSASTAYMELSSLRSEDTAVYYCARDHYGRYFYDHWGQGTLVTVSS

SEQ ID NO: 147 - protein, 112 aa, Artificial Sequence; identical to SEQ ID NO: 61
  Description of Artificial Sequence: Synthetic polypeptide

SEQ ID NO: 148 - protein, 119 aa, Artificial Sequence
  Description of Artificial Sequence: Synthetic polypeptide
QVQLVQSGAEVKKPGASVKVSCKASGYTFTSDHMHWVRQAPGQRLEWMGSINAGTGATKYSQKFQGRVTITRDTSASTAYMELSSLRSEDTAVYYCARDAYGHYFYDHWGQGTLVTVSS

SEQ ID NO: 149 - protein, 112 aa, Artificial Sequence; identical to SEQ ID NO: 61
  Description of Artificial Sequence: Synthetic polypeptide

SEQ ID NO: 150 - protein, 119 aa, Artificial Sequence
  Description of Artificial Sequence: Synthetic polypeptide
QVQLVQSGAEVKKPGASVKVSCKASGFNIKDYYMHWVRQAPGQRLEWMGWIDLENANTIYDAKFQGRVTITRDTSASTAYMELSSLRSEDTAVYYCARDAYGHIFYDVWGQGTLVTVSS

SEQ ID NO: 151 - protein, 112 aa, Artificial Sequence
  Description of Artificial Sequence: Synthetic polypeptide
DIVMTQSPDSLAVSLGERATINCKSSQSLLNARTGKNYLAWYQQKPGQPPKLLIYWASTRESGVPDRFSGSGSGTDFTLTISSLQAEDVAVYYCKQSYVHRTFGGGTKVEIK

SEQ ID NO: 152 - protein, 119 aa, Artificial Sequence
  Description of Artificial Sequence: Synthetic polypeptide
QVQLVQSGAEVKKPGASVKVSCKASGFNIKDYYMHWVRQAPGQRLEWMGWIDLENANTIYDAKFQGRVTITRDTSASTAYMELSSLRSEDTAVYYCARDAHGRYHYDVWGQGTLVTVSS

SEQ ID NO: 153 - protein, 111 aa, Artificial Sequence
  Description of Artificial Sequence: Synthetic polypeptide
DIVMTQSPDSLAVSLGERATINCKSSQSLLNRHTGKNYLAWYQQKPGQPPKLLIYWASTRESGVPDRFSGSGSGTDFTLTISSLQAEDVAVYYCKQSYSRRTFGGGTKVEI

SEQ ID NO: 154 - protein, 119 aa, Artificial Sequence
  Description of Artificial Sequence: Synthetic polypeptide
QVQLVQSGAEVKKPGASVKVSCKASGFNIKDYYMHWVRQAPGQRLEWMGWIDLENANTIYDAKFQGRVTITRDTSASTAYMELSSLRSEDTAVYYCARDAYGHGFYDVWGQGTLVTVSS

SEQ ID NO: 155 - protein, 112 aa, Artificial Sequence
  Description of Artificial Sequence: Synthetic polypeptide
DIVMTQSPDSLAVSLGERATINCKSSQSLLNARTGKNYLAWYQQKPGQPPKLLIYWASTRESGVPDRFSGSGSGTDFTLTISSLQAEDVAVYYCKQSYSHRTFGGGTKVEIK

SEQ ID NO: 156 - protein, 119 aa, Artificial Sequence
  Description of Artificial Sequence: Synthetic polypeptide
QVQLVQSGAEVKKPGASVKVSCKASGFNIKDYYMHWVRQAPGQRLEWMGWIDLENANTIYDAKFQGRVTITRDTSASTAYMELSSLRSEDTAVYYCARDAYGHVFYDVWGQGTLVTVSS

SEQ ID NO: 157 - protein, 112 aa, Artificial Sequence
  Description of Artificial Sequence: Synthetic polypeptide
DIVMTQSPDSLAVSLGERATINCKSSQSLLNARTGKNYLAWYQQKPGQPPKLLIYWASTRESGVPDRFSGSGSGTDFTLTISSLQAEDVAVYYCKQSYKHRTFGGGTKVEIK

SEQ ID NO: 158 - protein, 119 aa, Artificial Sequence
  Description of Artificial Sequence: Synthetic polypeptide
QVQLVQSGAEVKKPGASVKVSCKASGFNIKDYYMHWVRQAPGQRPAWMGWIDLENANTIYDAKFQGRVTITRDTSASTAYMELSSLRSEDTAVYYCARDASHRYFYDVWGQGTLVTVSS

SEQ ID NO: 159 - protein, 112 aa, Artificial Sequence
  Description of Artificial Sequence: Synthetic polypeptide
DIVMTQSPDSLAVSLGERATINCKSSQSLLNARTGKNYLAWYQQKPGQPPKLLIYWASTRESGVPDRFSGSGSGTDFTLTISSLQAEDVAVYYCGHSYSRRTFGGGTKVEIK

SEQ ID NO: 160 - protein, 119 aa, Artificial Sequence
  Description of Artificial Sequence: Synthetic polypeptide
QVQLVQSGAEVKKPGASVKVSCKASGFNIKDYYMHWVRQAPGQRLEWMGWIDLENANTIYDAKFQGRVTITRDTSASTAYMELSSLRSEDTAVYYCARDAYGHSFYDVWGQGTLVTVSS

SEQ ID NO: 161 - protein, 112 aa, Artificial Sequence
  Description of Artificial Sequence: Synthetic polypeptide
DIVMTQSPDSLAVSLGERATINCKSSQSLLNARTGKNYLAWYQQKPGQPPKLLIYWASTRESGVPDRFSGSGSGTDFTLTISSLQAEDVAVYYCKQSYHLRTFGGGTKVEIK

SEQ ID NO: 162 - protein, 119 aa, Artificial Sequence
  Description of Artificial Sequence: Synthetic polypeptide
QVQLVQSGAEVKKPGASVKVSCKASGFNIKDYYMHWVRQAPGQRLDWMGWIDLENANTIYDAKFQGRVTITRDTSASTAYMELSSLRSEDTAVYYCARDAYGHNFYDVWGQGTLVTVSS

SEQ ID NO: 163 - protein, 112 aa, Artificial Sequence
  Description of Artificial Sequence: Synthetic polypeptide
DIVMTQSPDSLAVSLGERATINCKSSQSLLNARTGKNYLAWYQQKPGQPPKLLIYWASTRESGVPDRFSGSGSGTDFTLTISSLQAEDVAVYYCKQSYHKRTFGGGTKVEIK

SEQ ID NO: 164 - protein, 119 aa, Artificial Sequence
  Description of Artificial Sequence: Synthetic polypeptide
QVQLVQSGAEVKKPGASVKVSCKASGFNIKDYYMHWVRQAPGQRLEWMGWIDLENANTIYDAKFQGRVTITRDTSASTAYMELSSLRSEDTAVYYCARDAYPHYFYDVWGQGTLVTVSS

SEQ ID NO: 165 - protein, 112 aa, Artificial Sequence
  Description of Artificial Sequence: Synthetic polypeptide
DIVMTQSPDSLAVSLGERATINCKSSQSLLNARTGKNYLAWYQQKPGQPPKLLIYWASTRESGVPDRFSGSGSGTDFTLTISSLQAEDVAVYYCKQSYHERTFGGGTKVEIK

SEQ ID NO: 166 - protein, 119 aa, Artificial Sequence
  Description of Artificial Sequence: Synthetic polypeptide
QVQLVQSGAEVKKPGASVKVSCKASGFNIKDYYMHWVRQAPGQRLDWMGWIDLENANTIYDAKFQGRVTITRDTSASTAYMELSSLRSEDTAVYYCARDAGHRYFYDVWGQGTLVTVSS

SEQ ID NO: 167 - protein, 112 aa, Artificial Sequence
  Description of Artificial Sequence: Synthetic polypeptide
DIVMTQSPDSLAVSLGERATINCKSSQSLLNARPGKNYLAWYQQKPGQPPKLLIYWASTRESGVPDRFSGSGSGTDFTLTISSLQAEDVAVYYCGHSYSRRTFGGGTKVEIK

SEQ ID NO: 168 - protein, 119 aa, Artificial Sequence
  Description of Artificial Sequence: Synthetic polypeptide
QVQLVQSGAEVKKPGASVKVSCKASGFNIKDYYMHWVRQAPGQRLAWMGWIDLENANTIYDAKFQGRVTITRDTSASTAYMELSSLRSEDTAVYYCARDAYGRHFYDVWGQGTLVTVSS

SEQ ID NO: 169 - protein, 112 aa, Artificial Sequence; identical to SEQ ID NO: 61
  Description of Artificial Sequence: Synthetic polypeptide

SEQ ID NO: 170 - protein, 119 aa, Artificial Sequence
  Description of Artificial Sequence: Synthetic polypeptide
QVQLVQSGAEVKKPGASVKVSCKASGFNIKDYYMHWVRQAPGQRLERMGWIDLENANTIYDAKFQGRVTITRDTSASTAYMELSSLRSEDTAVYYCARDAYGHTFYDVWGQGTLVTVSS

SEQ ID NO: 171 - protein, 112 aa, Artificial Sequence
  Description of Artificial Sequence: Synthetic polypeptide
DIVMTQSPDSLAVSLGERATINCKSSQSLLNARTGKNYLAWYQQKPGQPPKLLIYWASTRESGVPDRFSGSGSGTDFTLTISSLQAEDVAVYYCKQSYWHRTFGGGTKVEIK

SEQ ID NO: 172 - protein, 119 aa, Artificial Sequence
  Description of Artificial Sequence: Synthetic polypeptide
QVQLVQSGAEVKKPGASVKVSCKASGFNIKDYYMHWVRQAPGQRLQWMGWIDLENANTIYDAKFQGRVTITRDTSASTAYMELSSLRSEDTAVYYCARDAYGHSFYDVWGQGTLVTVSS

SEQ ID NO: 173 - protein, 112 aa, Artificial Sequence; identical to SEQ ID NO: 165
  Description of Artificial Sequence: Synthetic polypeptide

SEQ ID NO: 174 - protein, 119 aa, Artificial Sequence
  Description of Artificial Sequence: Synthetic polypeptide
QVQLVQSGAEVKKPGASVKVSCKASGFNIKDYYMHWVRQAPGQRLEWMGWIDLENANTIYDAKFQGRVTITRDTSASTAYMELSSLRSEDTAVYYCARDHYGHYFYDVWGQGTLVTVSS

SEQ ID NO: 175 - protein, 112 aa, Artificial Sequence
  Description of Artificial Sequence: Synthetic polypeptide
DIVMTQSPDSLAVSLGERATINCKSSQSLLNAHTGHNYLAWYQQKPGQPPKLLIYWASTRESGVPDRFSGSGSGTDFTLTISSLQAEDVAVYYCKQSHSHRTFGGGTKVEIK

SEQ ID NO: 176 - protein, 119 aa, Artificial Sequence; identical to SEQ ID NO: 160
  Description of Artificial Sequence: Synthetic polypeptide

SEQ ID NO: 177 - protein, 111 aa, Artificial Sequence
  Description of Artificial Sequence: Synthetic polypeptide
DIVMTQSPDSLAVSLGERATINCKSSQSLLNARTGKNYLAWYQQKPGQPPKLLIYWASTRESGVPDRFSGSGSGTDFTLTISSLQAEDVAVYYCKQSMHRRTFGGGTKVEI

SEQ ID NO: 178 - protein, 119 aa, Artificial Sequence
  Description of Artificial Sequence: Synthetic polypeptide
QVQLVQSGAEVKKPGASVKVSCKASGFNIKDYYMHWVRQAPGQRLEWMGWIDLENANTIYDAKFQGRVTITRDTSASTAYMELSSLRSEDTAVYYCARDHRGRYFYDVWGQGTLVTVSS

SEQ ID NO: 179 - protein, 112 aa, Artificial Sequence
  Description of Artificial Sequence: Synthetic polypeptide
DIVMTQSPDSLAVSLGERATINCKSSQSLLNARTGKNYLAWYQQKPGQPPKLLIYWASTRESGVPDRFSGSGSGTDFTLTISSLQAEDVAVYYCKQSSHRRTFGGGTKVEIK

SEQ ID NO: 180 - protein, 119 aa, Artificial Sequence
  Description of Artificial Sequence: Synthetic polypeptide
QVQLVQSGAEVKKPGASVKVSCKASGFNIKDYYMHWVRQAPGQRLEWMGWIDLENANTIYDAKFQGRVTITRDTSASTAYMELSSLRSDDTAVYYCARDQHGRYFYDVWGQGTLVTVSS

SEQ ID NO: 181 - protein, 112 aa, Artificial Sequence; identical to SEQ ID NO: 61
  Description of Artificial Sequence: Synthetic polypeptide

SEQ ID NO: 182 - protein, 119 aa, Artificial Sequence; identical to SEQ ID NO: 160
  Description of Artificial Sequence: Synthetic polypeptide

SEQ ID NO: 183 - protein, 112 aa, Artificial Sequence
  Description of Artificial Sequence: Synthetic polypeptide
DIVMTQSPDSLAVSLGERATINCKSSQSLLNARTGKNYLAWYQQKPGQPPKLLIYWASTRESGVPDRFSGSGSGTDFTLTISSLQAEDVAVYYCKQSYHWRTFGGGTKVEIK

SEQ ID NO: 184 - protein, 119 aa, Artificial Sequence
  Description of Artificial Sequence: Synthetic polypeptide
QVQLVQSGAEVKKPGASVKVSCKASGFDIKDYYMHWVRQAPGQRLEWMGWIDLENANTIYDAKFQGRVTITRDTSASTAYMELSSLRSEDTAVYYCARDAYGHAFYDVWGQGTLVTVSS

SEQ ID NO: 185 - protein, 112 aa, Artificial Sequence
  Description of Artificial Sequence: Synthetic polypeptide
DIVMTQSPDSLAVSLGERATINCKSSQSLLNARTGKNYLAWYQQKPGQPPKLLIYWASTRESGVPDRFSGSGSGTDFTLTISSLQAEDVAVYYCKQSYHGRTFGGGTKVEIK

SEQ ID NO: 186 - protein, 119 aa, Artificial Sequence
  Description of Artificial Sequence: Synthetic polypeptide
QVQLVQSGAEVKKPGASVKVSCKASGFNIKDYYMHWVRQAPGQRLERMGWIDLENANTIYDAKFQGRVTITRDTSASTAYMELSSLRSEDTAVYYCARDAYGHGFYDVWGQGTLVTVSS

SEQ ID NO: 187 - protein, 112 aa, Artificial Sequence
  Description of Artificial Sequence: Synthetic polypeptide
DIVMTQSPDSLAVSLGERATINCKSSQSLLNARTGKNYLAWYQQKPGQPPKLLIYWASTRESGVPDRFSGSGSGTDFTLTISSLQAEDVAVYYCKQSYRHRTFGGGTKVEIK

SEQ ID NO: 188 - protein, 119 aa, Artificial Sequence; identical to SEQ ID NO: 164
  Description of Artificial Sequence: Synthetic polypeptide

SEQ ID NO: 189 - protein, 112 aa, Artificial Sequence
  Description of Artificial Sequence: Synthetic polypeptide
DIVMTQSPDSLAVSLGERATINCKSSQSLLNARTGKNYLAWYQQKPGQPPKLLIYWASTRESGVPDRFSGSGSGTDFTLTISSLQAEDVAVYYCKQSYLHRTFGGGTKVEIK

SEQ ID NO: 190 - protein, 119 aa, Artificial Sequence
  Description of Artificial Sequence: Synthetic polypeptide
QVQLVQSGAEVKKPGASVKVSCKASGFNIKDYYMHWVRQAPGQRPEWMGWIDLENANTIYDAKFQGRVTITRDTSASTAYMELSSLRSEDTAVYYCARDAYGHSFYDVWGQGTLVTVSS

SEQ ID NO: 191 - protein, 112 aa, Artificial Sequence; identical to SEQ ID NO: 183
  Description of Artificial Sequence: Synthetic polypeptide

SEQ ID NO: 192 - protein, 119 aa, Artificial Sequence
  Description of Artificial Sequence: Synthetic polypeptide
QVQLVQSGAEVKKPGASVKVSCKASGFNIKDYYMHWVRQAPGQRPEWMGWIDLENANTIYDAKFQGRVTITRDTSASTAYMELSSLRSEDTAVYYCARDAAHRYFYDVWGQGTLVTVSS

SEQ ID NO: 193 - protein, 112 aa, Artificial Sequence
  Description of Artificial Sequence: Synthetic polypeptide
DIVMTQSPDSLAVSLGERATINCKSSQSLLNARPRKNYLAWYQQKPGQPPKLLIYWASTRESGVPDRFSGSGSGTDFTLTISSLQAEDVAVYYCKQSHDRRTFGGGTKVEIK

SEQ ID NO: 194 - protein, 119 aa, Artificial Sequence
  Description of Artificial Sequence: Synthetic polypeptide
QVQLVQSGAEVKKPGASVKVSCKASGFNIKDYYMHWVRQAPGQRLEWMGWIDLENANTIYDAKFQGRVTITRDTSASTAYMELSSLRSEDTAVYYCARDAYGHAFYDVWGQGTLVTVSS

SEQ ID NO: 195 - protein, 112 aa, Artificial Sequence
  Description of Artificial Sequence: Synthetic polypeptide
DIVMTQSPDSLAVSLGERATINCKSSQSLLNARTGKNYLAWYQQKPGQPPKLLIYWASTRESGVPDRFSGSGSGTDFTLTISSLQAEDVAVYYCKQSLHRRTFGGGTKVEIK

SEQ ID NO: 196 - protein, 119 aa, Artificial Sequence; identical to SEQ ID NO: 86
  Description of Artificial Sequence: Synthetic polypeptide

SEQ ID NO: 197 - protein, 112 aa, Artificial Sequence
  Description of Artificial Sequence: Synthetic polypeptide
DIVMTQSPDSLAVSLGERATINCKSSQSLLNAHTGKNHLAWYQQKPGQPPKLLIYWASTRESGVPDRFSGSGSGTDFTLTISSLQAEDVAVYYCKQSYSRRTFGGGTKVEIK

SEQ ID NO: 198 - protein, 119 aa, Artificial Sequence; identical to SEQ ID NO: 186
  Description of Artificial Sequence: Synthetic polypeptide

SEQ ID NO: 199 - protein, 112 aa, Artificial Sequence
  Description of Artificial Sequence: Synthetic polypeptide
DIVMTQSPDSLAVSLGERATINCKSSQSLLNARTGKNYLAWYQQKPGQPPKLLIYWASTRESGVPDRFSGSGSGTDFTLTISSLQAEDVAVYYCKQSYGHRTFGGGTKVEIK

SEQ ID NO: 200 - protein, 119 aa, Artificial Sequence; identical to SEQ ID NO: 60
  Description of Artificial Sequence: Synthetic polypeptide

SEQ ID NO: 201 - protein, 112 aa, Artificial Sequence
  Description of Artificial Sequence: Synthetic polypeptide
DIVMTQSPDSLAVSLGERATINCKSSQSLLNARTGKNYLAWYQQKPGQPPKLLIYWASTRESGVPDRFSGSGSGTDFTLTISSLQAEDVAVYYCKQSHTRRTFGGGTKVEIK

SEQ ID NO: 202 - protein, 119 aa, Artificial Sequence
  Description of Artificial Sequence: Synthetic polypeptide
QVQLVQSGAEVKKPGASVKVSCKASGFNIKDYYMHWVRQAPGQRLEWMGWIDLENANTIYDAKFQGRVTITRDTSASTAYMELSSLRSEDTAVYYCARDAYHEYFYDVWGQGTLVTVSS

SEQ ID NO: 203 - protein, 112 aa, Artificial Sequence
  Description of Artificial Sequence: Synthetic polypeptide
DIVMTQSPDSLAVSLGERATINCKSSQSLLNARTGKNYLAWYQQKPGQPPKLLIYWASTRESGVPDRFSGSGSGTDFTLTISSLQAEDVAVYYCKQSHVRRTFGGGTKVEIK

SEQ ID NO: 204 - protein, 119 aa, Artificial Sequence
  Description of Artificial Sequence: Synthetic polypeptide
QVQLVQSGAEVKKPGASVKVSCKASGFNIKDYYMHWVRQAPGQRLDWMGWIDLENANTIYDAKFQGRVTITRDTSASTAYMELSSLRSEDTAVYYCARDAYGHLFYDVWGQGTLVTVSS

SEQ ID NO: 205 - protein, 112 aa, Artificial Sequence
  Description of Artificial Sequence: Synthetic polypeptide
DIVMTQSPDSLAVSLGERATINCKSSQSLLNARTGKNYLAWYQQKPGQPPKLLIYWASTRESGVPDRFSGSGSGTDFTLTISSLQAEDVAVYYCKQSHMRRTFGGGTKVEIK

SEQ ID NO: 206 - protein, 118 aa, Artificial Sequence
  Description of Artificial Sequence: Synthetic polypeptide
QVQLVQSGAEVKKPGASVKVSCKASGFNIKDYYMHWVRQAPGQRLEWMGWIDLENANTIYDAKFQGRVTITRDTSASTAYMELSSLRSEDTAVYYCARDAYGHMFYDVWGQGTLVTVS

SEQ ID NO: 207 - protein, 112 aa, Artificial Sequence
  Description of Artificial Sequence: Synthetic polypeptide
DIVMTQSPDSLAVSLGERATINCKSSQSLLNARPGKNYLAWYQQKPGQPPKLLIYWASTRESGVPDRFSGSGSGTDFTLTISSLQAEDVAVYYCKQSYHMRTFGGGTKVEIK

SEQ ID NO: 208 - protein, 119 aa, Artificial Sequence
  Description of Artificial Sequence: Synthetic polypeptide
QVQLVQSGAEVKKPGASVKVSCKASGFNIKDYYMHWVRQAPGQRLEWMGWIDLENANTIYDAKFQGRVTITRDTSASTAYMELSSLRSEDTAVYYCARDAYGHNFYDVWGQGTLVTVSS

SEQ ID NO: 209 - protein, 112 aa, Artificial Sequence
  Description of Artificial Sequence: Synthetic polypeptide
DIVMTQSPDSLAVSLGERATINCKSSQSLLNARTGKNYLAWYQQKPGQPPKLLIYWASTRESGVPDRFSGSGSGTDFTLTISSLQAEDVAVYYCKQSYTHRTFGGGTKVEIK

SEQ ID NO: 210 - protein, 119 aa, Artificial Sequence
  Description of Artificial Sequence: Synthetic polypeptide
QVQLVQSGAEVKKPGASVKVSCKASGSNIKDYYMHWVRQAPGQRLEWMGWIDLENANTIYDAKFQGRVTITRDTSASTAYMELSSLRSEDTAVYYCARDAYGHSFYDVWGQGTLVTVSS

SEQ ID NO: 211 - protein, 112 aa, Artificial Sequence; identical to SEQ ID NO: 185
  Description of Artificial Sequence: Synthetic polypeptide

SEQ ID NO: 212 - protein, 119 aa, Artificial Sequence
  Description of Artificial Sequence: Synthetic polypeptide
QVQLVQSGAEVKKPGASVKVSCKASGFNIKDYYMHWVRQAPGQRLEWMGWIDLENANTIYDAKFQGRVTITRDTSASTAYMELSSLRSEDTAVYYCARDATHRYFYDVWGQGTLVTVSS

SEQ ID NO: 213 - protein, 111 aa, Artificial Sequence
  Description of Artificial Sequence: Synthetic polypeptide
DIVMTQSPDSLAVSLGERATINCKSSQSLLNARTGKNYLAWYQQKPGQPPKLLIYWASTRESGVPDRFSGSGSGTDFTLTISSLQAEDVAVYYCKQSHTRRTFGGGTKVEI

SEQ ID NO: 214 - protein, 119 aa, Artificial Sequence
  Description of Artificial Sequence: Synthetic polypeptide
QVQLVQSGAEVKKPGASVKVSCKASGFNIKDYYMHWVRQAPGQRLEWMGWIDLENANTIYDAKFQGRVTITRDTSASTAYMELSSLRSEDTAVYYCARDMHGRYFYDVWGQGTLVTVSS

SEQ ID NO: 215 - protein, 112 aa, Artificial Sequence
  Description of Artificial Sequence: Synthetic polypeptide
DIVMTQSPDSLAVSLGERATINCKSSQSLLNARTGKNYLAWYQQKPGQPPKLLIYWASTRESGVPDRFSGSGSGTDFTLTISSLQAEDVAVYYCKQSEHRRTFGGGTKVEIK

SEQ ID NO: 216 - protein, 119 aa, Artificial Sequence
  Description of Artificial Sequence: Synthetic polypeptide
QVQLVQSGAEVKKPGASVKVSCKASGFNIKDYYMHWVRQAPGQRLEWMGWIDLENANTIYDAKFQGRVTITRDTSASTAYMELSSLRSEDTAVYYCARDAYGRYHYDVWGQGTLVTVSS

SEQ ID NO: 217 - protein, 112 aa, Artificial Sequence; identical to SEQ ID NO: 187
  Description of Artificial Sequence: Synthetic polypeptide

SEQ ID NO: 218 - protein, 119 aa, Artificial Sequence
  Description of Artificial Sequence: Synthetic polypeptide
QVQLVQSGAEVKKPGASVKVSCKASGFNIKDYYMHWVRQAPGQRLEWMGWIDLENANTIYDAKFQGRVTITRDTSASTAYMELSSLRSEDTAVYYCARDAHGRYFYDHWGQGTLVTVSS

SEQ ID NO: 219 - protein, 112 aa, Artificial Sequence
  Description of Artificial Sequence: Synthetic polypeptide
DIVMTQSPDSLAVSLGERATINCKSSQSLLNAHTGHNYLAWYQQKPGQPPKLLIYWASTRESGVPDRFSGSGSGTDFTLTISSLQAEDVAVYYCKQSYSHRTFGGGTKVEIK

SEQ ID NO: 220 - protein, 119 aa, Artificial Sequence; identical to SEQ ID NO: 64
  Description of Artificial Sequence: Synthetic polypeptide

SEQ ID NO: 221 - protein, 112 aa, Artificial Sequence
  Description of Artificial Sequence: Synthetic polypeptide
DIVMTQSPDSLAVSLGERATINCKSSQSLLNARTGKNYLAWYQQKPGQPPKLLIYWASTRESGVPDRFSGSGSGTDFTLTISSLQAEDVAVYYCKQSHSRRTFGGGTKVEIK

SEQ ID NO: 222 - protein, 119 aa, Artificial Sequence
  Description of Artificial Sequence: Synthetic polypeptide
QVQLVQSGAEVKKPGASVKVSCKASGFNIKDYYMHWVRQAPGQRLPWMGWIDLENANTIYDAKFQGRVTITRDTSASTAYMELSSLRSEDTAVYYCARDAHERYFYDVWGQGTLVTVSS

SEQ ID NO: 223 - protein, 112 aa, Artificial Sequence
  Description of Artificial Sequence: Synthetic polypeptide
DIVMTQSPDSLAVSLGERATINCKSSQSLLNARTGKNYLAWYQQKPGQPPKLLIYWASTRESGVPDRFSGSGSGTDFTLTISSLQAEDVAVYYCKQSHLRRTFGGGTKVEIK

SEQ ID NO: 224 - protein, 119 aa, Artificial Sequence
  Description of Artificial Sequence: Synthetic polypeptide
QVQLVQSGAEVKKPGASVKVSCKASGFNIKDYYMHWVRQAPGQRLEWMGWIDLENANTIYDAKFQGRVTITRDTSASTAYMELSSLRSEDTAVYYCARDAYGHWFYDVWGQGTLVTVSS

SEQ ID NO: 225 - protein, 112 aa, Artificial Sequence
  Description of Artificial Sequence: Synthetic polypeptide
DIVMTQSPDSLAVSLGERATINCKSSQSLLNARTGKNYLAWYQQKPGQPPKLLIYWASTRESGVPDRFSGSGSGTDFTLTISSLQAEDVAVYYCKQSYHHRTFGGGTKVEIK

SEQ ID NO: 226 - protein, 119 aa, Artificial Sequence; identical to SEQ ID NO: 60
  Description of Artificial Sequence: Synthetic polypeptide

SEQ ID NO: 227 - protein, 112 aa, Artificial Sequence
  Description of Artificial Sequence: Synthetic polypeptide
DIVMTQSPDSLAVSLGERATINCKSSQSLLNARTGKNYLAWYQQKPGQPPKLLIYWASTRESGVPDRFSGSGSGTDFTLTISSLQAEDVAVYYCKQSGHRRTFGGGTKVEIK

SEQ ID NO: 228 - protein, 119 aa, Artificial Sequence
  Description of Artificial Sequence: Synthetic polypeptide
QVQLVQSGAEVKKPGASVKVSCKASGFNIKDYYMHWVRQAPGQRPAWMGWIDLENANTIYDAKFQGRVTITRDTSASTAYMELSSLRSEDTAVYYCARDAYGHGFYDVWGQGTLVTVSS

SEQ ID NO: 229 - protein, 112 aa, Artificial Sequence; identical to SEQ ID NO: 199
  Description of Artificial Sequence: Synthetic polypeptide

SEQ ID NO: 230 - protein, 119 aa, Artificial Sequence
  Description of Artificial Sequence: Synthetic polypeptide
QVQLVQSEAEVKKPGASVKVSCKASGFNIKDYYMHWVRQAPGQRLQWMGWIDLENANTIYDAKFQGRVTITRDTSASTAYMELSSLRSEDTAVYYCARDAYGHGFYDVWGQGTLVTVSS

SEQ ID NO: 231 - protein, 112 aa, Artificial Sequence
  Description of Artificial Sequence: Synthetic polypeptide
DIVMTQSPDSLAVSLGERATINCKSSQSLLNARPGKNYLAWYQQKPGQPPKLLIYWASTRESGVPDRFSGSGSGTDFTLTISSLQAEDVAVYYCKQSYSRRTFGGGTKVEIK

SEQ ID NO: 232 - protein, 119 aa, Artificial Sequence
  Description of Artificial Sequence: Synthetic polypeptide
QVQLVQSGAEVKKPGASVKVSCKASGFNIKDYYMHWVRQAPGQRLAWMGWIDLENANTIYDAKFQGRVTITRDTSASTAYMELSSLRSEDTAVYYCARDAYGRFHYDVWGQGTLVTVSS

SEQ ID NO: 233 - protein, 112 aa, Artificial Sequence; identical to SEQ ID NO: 231
  Description of Artificial Sequence: Synthetic polypeptide

SEQ ID NO: 234 - protein, 119 aa, Artificial Sequence
  Description of Artificial Sequence: Synthetic polypeptide
QVQLVQSGAEVKKPGASVKVSCKASGFNIKDYYMHWVRQAPGQRLDWMGWIDLENANTIYDAKFQGRVTITRDTSASTAYMELSSLRSEDTAVYYCARDAYGRHFYDVWGQGTLVTVSS

SEQ ID NO: 235 - protein, 112 aa, Artificial Sequence
  Description of Artificial Sequence: Synthetic polypeptide
DIVMTQSPDSLAVSLGERATINCKSSQSLLNARTRTNYLAWYQQKPGQPPKLLIYWASTRESGVPDRFSGSGSGTDFTLTISSLQAEDVAVYYCKQSYSRRTFGGGTKVEIK

SEQ ID NO: 236 - protein, 119 aa, Artificial Sequence
  Description of Artificial Sequence: Synthetic polypeptide
QVQLVQSGAEVKKPGASVKVSCKASGFNIKDYYMHWVRQAPGQRLEWMGWIDLENANTIYDAKFQGRVTITRDTSASTAYMELSSLRSEDTAVYYCARDAYGRNHYDVWGQGTLVTVSS

SEQ ID NO: 237 - protein, 112 aa, Artificial Sequence
  Description of Artificial Sequence: Synthetic polypeptide
DIVMTQSPDSLAVSLGERATINCKSSQSLLNARTGKSYLAWYQQKPGQPPKLLIYWASTRESGVPDRFSGSGSGTDFTLTISSLQAEDVAVYYCKQSYVHRTFGGGTKVEIK

SEQ ID NO: 238 - protein, 119 aa, Artificial Sequence
  Description of Artificial Sequence: Synthetic polypeptide
QVQLVQSGAEVKKPGASVKVSCKASGFNIKDYYMHWVRQAPGQRLAWMGWIDLENANTIYDAKFQGRVTITRDTSASTAYMELSSLRSEDTAVYYCARDAYGHDFYDVWGQGTLVTVSS

SEQ ID NO: 239 - protein, 112 aa, Artificial Sequence; identical to SEQ ID NO: 61
  Description of Artificial Sequence: Synthetic polypeptide

SEQ ID NO: 240 - protein, 119 aa, Artificial Sequence
  Description of Artificial Sequence: Synthetic polypeptide
QVQLVQSGAEVKKPGASVKVSCKASGFNIKDYYMHWVRQAPGQRLEWMGWIDLENANTIYDAKFQGRVTITRDTSASTAYMELSSLRSEDTAVYYCAHDAYGHYFYDVWGQGTLVTVSS

SEQ ID NO: 241 - protein, 112 aa, Artificial Sequence
  Description of Artificial Sequence: Synthetic polypeptide
DIVMTQSPDSLAVSLGERATINCKSSQSLLNAHTGHNYLAWYQQKPGQPPKLLIYWASTRESGVPDRFSGSGSGTDFTLTISSLQAEDVAVYYCKQSYHHRTFGGGTKVEIK

SEQ ID NO: 242 - protein, 119 aa, Artificial Sequence
  Description of Artificial Sequence: Synthetic polypeptide
QVQLVQSGAEVKKPGASVKVSCKASGFNIKDYYMHWVRQAPGQRLEWMGWIDLENANTIYDAKFQGRVTITRDTSASTAYMELSSLRSEDTAVYYCARDAVHRYFYDVWGQGTLVTVSS

SEQ ID NO: 243 - protein, 112 aa, Artificial Sequence
  Description of Artificial Sequence: Synthetic polypeptide
DIVMTQSPDSLAVSLGERATINCKSSQSLLNARTGKNYLAWYQQKPGQPPKLLIYWASTRESGVPDRFSGSGSGTDFTLTISSLQAEDVAVYYCKQSYHPRTFGGGTKVEIK

SEQ ID NO: 244 - protein, 119 aa, Artificial Sequence
  Description of Artificial Sequence: Synthetic polypeptide
QVQLVQSGAEVKKPGASVKVSCKASGFNIKDYYMHWVRQAPGQRLEWMGWIDLENANTIYDAKFQGRVTITRDTSASTAYMELSSLRSEDTAVYYCARDAYGHTFYDVWGQGTLVTVSS

SEQ ID NO: 245 - protein, 112 aa, Artificial Sequence
  Description of Artificial Sequence: Synthetic polypeptide
DIVMTQSPDSLAVSLGERATINCKSSQSLLNARTGKNYLAWYQQKPGQPPKLLIYWASTRESGVPDRFSGSGSGTDFTLTISSLQAEDVAVYYCKQSYSHVTFGGGTKVEIK

SEQ ID NO: 246 - protein, 119 aa, Artificial Sequence
  Description of Artificial Sequence: Synthetic polypeptide
QVQLVQSGAEVKKPGASVKVSCEASGFNIKDYYMHWVRQAPGQTLAWMGWIDLENANTIYDAKFQGRVTITRDTSASTAYMELSSLRSEDTAVYYCARDAYGHVFYDVWGQGTLVTVSS

SEQ ID NO: 247 - protein, 112 aa, Artificial Sequence; identical to SEQ ID NO: 189
  Description of Artificial Sequence: Synthetic polypeptide

SEQ ID NO: 248 - protein, 119 aa, Artificial Sequence
  Description of Artificial Sequence: Synthetic polypeptide
QVQLVQSGAEVKKPGASVKVSCKASGFNIKDYYMHWVRQAPGQRLEWMGWIDLENANTIYDAKFQGRVTITRDTSASTAYMELSSLRSEDTAVYYCARDAYGHQFYDVWGQGTLVTVSS

SEQ ID NO: 249 - protein, 112 aa, Artificial Sequence
  Description of Artificial Sequence: Synthetic polypeptide
DIVMTQSPDSLAVSLGERATINCKSSQSLLNARTGKNYLAWYQQKPGQPPKLLIYWASTRESGVPDRFSGSGSGTDFTLTISSLQAEDVAVYYCKQSYHTRTFGGGTKVEIK

SEQ ID NO: 250 - protein, 119 aa, Artificial Sequence
  Description of Artificial Sequence: Synthetic polypeptide
QVQLVQSGAEVKKPGASVKVSCKASGFNIKDYYMHWVRQAPGQRLEWMGWIDLENANTIYDAKFQGRVTITRDTSASTAYMELSSLRSEDTAVYYCARDAYGHDFYDVWGQGTLVTVSS

SEQ ID NO: 251 - protein, 112 aa, Artificial Sequence; identical to SEQ ID NO: 231
  Description of Artificial Sequence: Synthetic polypeptide

SEQ ID NO: 252 - protein, 119 aa, Artificial Sequence; identical to SEQ ID NO: 156
  Description of Artificial Sequence: Synthetic polypeptide

SEQ ID NO: 253 - protein, 112 aa, Artificial Sequence
  Description of Artificial Sequence: Synthetic polypeptide
DIVMTQSPDSLAVSLGERATINCKSSQSLLNASTAKNYLAWYQQKPGQPPKLLIYWASTRESGVPDRFSGSGSGTDFTLTISSLQAEDVAVYYCKQSYRHRTFGGGTKVEIK

SEQ ID NO: 254 - protein, 119 aa, Artificial Sequence; identical to SEQ ID NO: 156
  Description of Artificial Sequence: Synthetic polypeptide

SEQ ID NO: 255 - protein, 112 aa, Artificial Sequence; identical to SEQ ID NO: 179
  Description of Artificial Sequence: Synthetic polypeptide

SEQ ID NO: 256 - protein, 119 aa, Artificial Sequence
  Description of Artificial Sequence: Synthetic polypeptide
QVQLVQSGAEVKKPGASVKVSCEASGFNIKDYYMHWVRQAPGQRLEWMGWIDLENANTIYDAKFQGRVTITRDTSASTAYMELSSLRSEDTAVYYCARDAYGHVFYDVWGQGTLVTVSS

SEQ ID NO: 257 - protein, 112 aa, Artificial Sequence; identical to SEQ ID NO: 189
  Description of Artificial Sequence: Synthetic polypeptide

SEQ ID NO: 258 - protein, 119 aa, Artificial Sequence; identical to SEQ ID NO: 250
  Description of Artificial Sequence: Synthetic polypeptide

SEQ ID NO: 259 - protein, 112 aa, Artificial Sequence
  Description of Artificial Sequence: Synthetic polypeptide
DIVMTQSPDSLAVSLGERATINCKSSQSLLNARTGKNYLAWYQQKPGQPPKLLIYWASTRESGVPDRFSGSGSGTDFTLTISSLQAEDVAVYYCKQSWHRRTFGGGTKVEIK

SEQ ID NO: 260 - protein, 119 aa, Artificial Sequence; identical to SEQ ID NO: 250
  Description of Artificial Sequence: Synthetic polypeptide

SEQ ID NO: 261 - protein, 112 aa, Artificial Sequence
  Description of Artificial Sequence: Synthetic polypeptide
DIVMTQSPDSLAVSLGERATINCKSSQSLLNARTGKNYLAWYQQKPGQPPKLLIYWASTRESGVPDRFSGSGSGTDFTLTISSLQAEDVAVYYCKQSYHRRTFGGGTKVEIK

SEQ ID NO: 262 - protein, 119 aa, Artificial Sequence; identical to SEQ ID NO: 240
  Description of Artificial Sequence: Synthetic polypeptide

SEQ ID NO: 263 - protein, 112 aa, Artificial Sequence
  Description of Artificial Sequence: Synthetic polypeptide
DIVMTQSPDSLAVSLGERATINCKSSQSLLNARTGHNYLAWYQQKPGQPPKLLIYWASTRESGVPDRFSGRGSGTDFTLTISSLQAEDVAVYYCKQSYHHRTFGGGTKVEIK

SEQ ID NO: 264 - protein, 119 aa, Artificial Sequence
  Description of Artificial Sequence: Synthetic polypeptide
QVQLVQSGAEVKKPGASVKVSCKASGFNIKDYYMHWVRQAPGQRLDWMGWIDLENANTIYDAKFQGRVTITRDTSASTAYMELSSLRSEDTAVYYCARDAYGHDFYDVWGQGTLVTVSS

SEQ ID NO: 265 - protein, 112 aa, Artificial Sequence; identical to SEQ ID NO: 61
  Description of Artificial Sequence: Synthetic polypeptide

SEQ ID NO: 266 - protein, 119 aa, Artificial Sequence; identical to SEQ ID NO: 194
  Description of Artificial Sequence: Synthetic polypeptide

SEQ ID NO: 267 - protein, 112 aa, Artificial Sequence
  Description of Artificial Sequence: Synthetic polypeptide
DIVMTQSPDSLAVSLGERATINCKSSQSLLNARTGKNYLAWYQQKPGQPPKLLIYWASTRESGVPDRFSGSGSGTDFTLTISSLQAEDVAVYYCKQSYHQRTFGGGTKVEIK

SEQ ID NO: 268 - protein, 119 aa, Artificial Sequence
  Description of Artificial Sequence: Synthetic polypeptide
QVQLVQSGAEVKKPGASVKVSCEASGFNIKDYYMHWVRQAPGQRPEWMGWIDLENANTIYDAKFQGRVTITRDTSASTAYMELSSLRSEDTAVYYCARDAYGHVFYDVWGQGTLVTVSS

SEQ ID NO: 269 - protein, 112 aa, Artificial Sequence; identical to SEQ ID NO: 189
  Description of Artificial Sequence: Synthetic polypeptide

SEQ ID NO: 270 - protein, 119 aa, Artificial Sequence
  Description of Artificial Sequence: Synthetic polypeptide
QVQLVQSGAEVKKPGASVKVSCKASGFNIKDYYMHWVRQAPGQRPEWMGWIDLENANTIYDAKFQGRVTITRDTSASTAYMELSSLRSEDTAVYYCARDAYGHDFYDVWGQGTLVTVSS

SEQ ID NO: 271 - protein, 112 aa, Artificial Sequence; identical to SEQ ID NO: 61
  Description of Artificial Sequence: Synthetic polypeptide

SEQ ID NO: 272 - protein, 119 aa, Artificial Sequence
  Description of Artificial Sequence: Synthetic polypeptide
QVQLVQSGAEVKKPGASVKVSCKASGFNIKDYYMHWVRQAPGQTLDWMGWIDLENANTIYDAKFQGRVTITRDTSASTAYMELSSLRSEDTAVYYCARDAYGRNHYDVWGQGTLVTVSS

SEQ ID NO: 273 - protein, 112 aa, Artificial Sequence
  Description of Artificial Sequence: Synthetic polypeptide
DIVMTQSPDSLAVSLGERATINCKSSQSLLNARPGKNYLAWYQQKPGQPPKLLIYWASTRESGVPDRFSGSGSGTDFTLTISSLQAEDVAVYYCKQSYLHRTFGGGTKVEIK

SEQ ID NO: 274 - protein, 119 aa, Artificial Sequence; identical to SEQ ID NO: 250
  Description of Artificial Sequence: Synthetic polypeptide

SEQ ID NO: 275 - protein, 112 aa, Artificial Sequence; identical to SEQ ID NO: 61
  Description of Artificial Sequence: Synthetic polypeptide

SEQ ID NO: 276 - protein, 119 aa, Artificial Sequence
  Description of Artificial Sequence: Synthetic polypeptide
QVQLVQSGAEVKKPGASVKVSCKASGFNIKDYYMHWVRQAPGQRLQWMGWIDLENANTIYDAKFQGRVTITRDTSASTAYMELSSLRSEDTAVYYCARDARHRYFYDVWGQGTLVTVSS

SEQ ID NO: 277 - protein, 112 aa, Artificial Sequence
  Description of Artificial Sequence: Synthetic polypeptide
DIVMTQSPDSLAVSLGERATINCKSSQSLLNARTGKNYLAWYQQKPGQPPKLLIYWASTRESGVPDRFSGSGSGTDFTLTISSLQAEDVAVYYCKQSYSHGTFGGGTKVEIK

SEQ ID NO: 278 - protein, 119 aa, Artificial Sequence
  Description of Artificial Sequence: Synthetic polypeptide
QVQLVQSGAEVKKPGASVKVSCKASGFNIKDYYMHWVRQAPGQRLQWMGWIDLENANTIYDAKFQGRVTITRDTSASTAYMELSSLRSEDTAVYYCARDAYGHVFYDVWGQGTLVTVSS

SEQ ID NO: 279 - protein, 112 aa, Artificial Sequence; identical to SEQ ID NO: 225
  Description of Artificial Sequence: Synthetic polypeptide

SEQ ID NO: 280 - protein, 119 aa, Artificial Sequence; identical to SEQ ID NO: 250
  Description of Artificial Sequence: Synthetic polypeptide

SEQ ID NO: 281 - protein, 112 aa, Artificial Sequence; identical to SEQ ID NO: 199
  Description of Artificial Sequence: Synthetic polypeptide

SEQ ID NO: 282 - protein, 119 aa, Artificial Sequence
  Description of Artificial Sequence: Synthetic polypeptide
QVQLVQSGAEVKKPGASVKVSCKASGFNIKDYYMHWVRQAPGQRLEWMGWIDLENANTIYDAKFQGRVTITRDTSASTAYMELSSLRSEDTAVYYCARDAYGHEFYDVWGQGTLVTVSS

SEQ ID NO: 283 - protein, 112 aa, Artificial Sequence
  Description of Artificial Sequence: Synthetic polypeptide
DIVMTQSPDSLAVSLGERATINCKSSQSLLNARTGKNYLAWYQQKPGQPPKLLIYWASTRESGVPDRFSGSGSGTDFTLTISSLQAEDVAVYYCKQGHSRRTFGGGTKVEIK

SEQ ID NO: 284 - protein, 119 aa, Artificial Sequence
  Description of Artificial Sequence: Synthetic polypeptide
QVQLVQSGAEVKKPGASVKVSCKASGFNIKDYYMHWVRQAPGQRLEWMGWIDLENANTIYDAKFQGRVTITRDTSASTAYMELSSLRSEDTAVYYCARDAYHRYHYDVWGQGTLVTVSS

SEQ ID NO: 285 - protein, 112 aa, Artificial Sequence
  Description of Artificial Sequence: Synthetic polypeptide
DIVMTQSPDSLAVSLGERATINCKSSQSLLNAHTHKNYLAWYQQKPGQPPKLLIYWASTRESGVPDRFSGSGSGTDFTLTISSLQAEDVAVYYCKQSHSHRTFGGGTKVEIK

SEQ ID NO: 286 - protein, 119 aa, Artificial Sequence
  Description of Artificial Sequence: Synthetic polypeptide
QVQLVQSGAEVEKPGASVKVSCKASGFNIKDYYMHWVRQAPGQRLEWMGWIDLENANTIYDAKFQGRVTITRDTSASTAYMELSSLRSEDTAVYYCARDAHGRYHYDVWGQGTLVTVSS

SEQ ID NO: 287 - protein, 112 aa, Artificial Sequence; identical to SEQ ID NO: 63
  Description of Artificial Sequence: Synthetic polypeptide

SEQ ID NO: 288 - protein, 119 aa, Artificial Sequence
  Description of Artificial Sequence: Synthetic polypeptide
QVQLVQSGAEVKKPGASVKVSCKASGFNIKDYYMHWVRQAPGQRLEWMGWIDLENANTIYDAKFQGRVTITRDTSASTAYMELSSLRSEDTAVYYCARDAYRHEFYDVWGQGTLVTVSS

SEQ ID NO: 289 - protein, 112 aa, Artificial Sequence
  Description of Artificial Sequence: Synthetic polypeptide
DIVMTQSPDSLAVSLGERATINCKSSQSLLNARTGKNYLAWYQQKPGQPPKLLIYWASTRESGVPDRFSGSGSGTDFTLTISSLQAEDVAVYYCKQSYYHRTFGGGTKVEIK

SEQ ID NO: 290 - protein, 119 aa, Artificial Sequence; identical to SEQ ID NO: 156
  Description of Artificial Sequence: Synthetic polypeptide

SEQ ID NO: 291 - protein, 112 aa, Artificial Sequence
  Description of Artificial Sequence: Synthetic polypeptide
DIVMTQSPDSLAVSLGERATINCKSSQSLLNARTGKNYLAWYQQKPGQPPKLLIYWASTRESGVPDRFSGSGSGTDFTLTISSLQAEDVAVYYCKQSYQHRTFGGGTKVEIK

SEQ ID NO: 292 - protein, 119 aa, Artificial Sequence; identical to SEQ ID NO: 156
  Description of Artificial Sequence: Synthetic polypeptide

SEQ ID NO: 293 - protein, 112 aa, Artificial Sequence; identical to SEQ ID NO: 225
  Description of Artificial Sequence: Synthetic polypeptide

SEQ ID NO: 294 - protein, 119 aa, Artificial Sequence; identical to SEQ ID NO: 250
  Description of Artificial Sequence: Synthetic polypeptide

SEQ ID NO: 295 - protein, 112 aa, Artificial Sequence; identical to SEQ ID NO: 155
  Description of Artificial Sequence: Synthetic polypeptide

SEQ ID NO: 296 - protein, 119 aa, Artificial Sequence; identical to SEQ ID NO: 244
  Description of Artificial Sequence: Synthetic polypeptide

SEQ ID NO: 297 - protein, 112 aa, Artificial Sequence
  Description of Artificial Sequence: Synthetic polypeptide
DIVMTQSPDSLAVSLGERATINCKSSQSLLNARTGKNYLAWYQQKPGQPPKLLIYWASTRESGVPDRFSGSGSGTDFTLTISSLQAEDVAVYYCKQSYHVRTFGGGTKVEIK

SEQ ID NO: 298 - protein, 119 aa, Artificial Sequence
  Description of Artificial Sequence: Synthetic polypeptide
QVQLVQSGAEVKKPGASVKVSCKASGFNIKDYYMHWVRQAPGQRLERMGWIDLENANTIYDAKFQGRVTITRDTSASTAYMELSSLRSEDTAVYYCARDAYGHEFYDVWGQGTLVTVSS

SEQ ID NO: 299 - protein, 112 aa, Artificial Sequence; identical to SEQ ID NO: 61
  Description of Artificial Sequence: Synthetic polypeptide

SEQ ID NO: 300 - protein, 119 aa, Artificial Sequence
  Description of Artificial Sequence: Synthetic polypeptide
QVQLVQSGAEVKKPGASVKVSCKASGYTFTAYTMHWVRQAPGHRLEWMGWINPDTGATDYSQKFQGRVTITRDTSASTAYMELSSLRSEDTAVYYCARDAYHHYFYDVWGQGTLVTVSS

SEQ ID NO: 301 - protein, 112 aa, Artificial Sequence; identical to SEQ ID NO: 61
  Description of Artificial Sequence: Synthetic polypeptide

SEQ ID NO: 302 - protein, 119 aa, Artificial Sequence
  Description of Artificial Sequence: Synthetic polypeptide
QVQLVQSGAEVKKPGASVKVSCKASGYTFASYDMHWVRQAPGQRLEWMGWIDAGTGATVYSQKFQGRVTITRDTSASTAYMELSSLRSEDTAVYYCARDAYGHYFYDHWGQGTLVTVSS

SEQ ID NO: 303 - protein, 112 aa, Artificial Sequence; identical to SEQ ID NO: 61
  Description of Artificial Sequence: Synthetic polypeptide

SEQ ID NO: 304 - protein, 119 aa, Artificial Sequence
  Description of Artificial Sequence: Synthetic polypeptide
QVQLVQSGAEVKKPGASVKVSCKASGYTFNDYAMHWVRQAPGQRLEWMGWIDAGTGNTYYSQKFQGRVTITRDTSASTAYMELSSLRSEDTAVYYCARDAHGHYFYDVWGQGTLVTVSS

SEQ ID NO: 305 - protein, 112 aa, Artificial Sequence; identical to SEQ ID NO: 61
  Description of Artificial Sequence: Synthetic polypeptide

SEQ ID NO: 306 - protein, 119 aa, Artificial Sequence
  Description of Artificial Sequence: Synthetic polypeptide
QVQLVQSGAEVKKPGASVKVSCKASGYTFTAYTMHWVRQAPGQRLEWMGWINPDTGATDYSQKFQGRVTITRDTSASTAYMELSSLRSEDTAVYYCARDAYHHYFYDVWGQGTLVTVSS

SEQ ID NO: 307 - protein, 112 aa, Artificial Sequence; identical to SEQ ID NO: 61
  Description of Artificial Sequence: Synthetic polypeptide

SEQ ID NO: 308 - protein, 119 aa, Artificial Sequence
  Description of Artificial Sequence: Synthetic polypeptide
QVQLVQSGAEVKEPGASVKVSCKASGFNIKDYYMHWVRQAPGQRLEWMGWIDLENANTIYDAKFQGRVTITRDTSASTAYMELSSLRSEDTAVYYCARDAHHRYFYDVWGQGTLVTVSS

SEQ ID NO: 309 - protein, 112 aa, Artificial Sequence; identical to SEQ ID NO: 63
  Description of Artificial Sequence: Synthetic polypeptide

SEQ ID NO: 310 - protein, 119 aa, Artificial Sequence
  Description of Artificial Sequence: Synthetic polypeptide
QVQLVQSGAEVKKPGASVKVSCKASGYTFTSYNMHWVRQAPGPSLEWMGSIDAGTGATDYSQKFQGRVTITRDTSASTAYMELSSLRSEDTAVYYCARDAYHHYFYDVWGQGTLVTVSS

SEQ ID NO: 311 - protein, 112 aa, Artificial Sequence; identical to SEQ ID NO: 61
  Description of Artificial Sequence: Synthetic polypeptide

SEQ ID NO: 312 - protein, 119 aa, Artificial Sequence
  Description of Artificial Sequence: Synthetic polypeptide
QVQLVQSGAEVKKPGASVKVSCKASGYTFESYVMHWVRQAPGQRLEWMGWIHSGTGNTDYSQKFQGRVTITRDTSASTAYMELSSLRSEDTAVYYCARDAYGHYFYDHWGQGTLVTVSS

SEQ ID NO: 313 - protein, 112 aa, Artificial Sequence; identical to SEQ ID NO: 61
  Description of Artificial Sequence: Synthetic polypeptide

SEQ ID NO: 314 - protein, 119 aa, Artificial Sequence
  Description of Artificial Sequence: Synthetic polypeptide
QVQLVQSGAEVKKPGASVKVSCKASGYTFTSAVMHWVRQAPGQRLEWMGDINAGTGATDYSQKFQGRVTITRDTSASTAYMELSSLRSEDTAVYYCARDAYGRYFYDVWGQGTLVTVSS

SEQ ID NO: 315 - protein, 112 aa, Artificial Sequence; identical to SEQ ID NO: 61
  Description of Artificial Sequence: Synthetic polypeptide

SEQ ID NO: 316 - protein, 119 aa, Artificial Sequence
  Description of Artificial Sequence: Synthetic polypeptide
QVQLVQSGAEVKKPGASVKVSCKASGYTFVDYAMHWVRQAPGQRLEWMGWIDAGTGNTDYSQKFQGRVTITRDTSASTAYMELSSLRSEDTAVYYCARDAHGHYFYDVWGQGTLVTVSS

SEQ ID NO: 317 - protein, 112 aa, Artificial Sequence; identical to SEQ ID NO: 61
  Description of Artificial Sequence: Synthetic polypeptide

SEQ ID NO: 318 - protein, 119 aa, Artificial Sequence
  Description of Artificial Sequence: Synthetic polypeptide
QVQLVQSGAEVKKPGASVKVSCKASGYTFTDDAMHWVRQAPGQRLEWMGWIDAGTGNTYYSQKFQGRVTITRDTSASTAYMELSSLRSEDTAVYYCAHDAYGHYFYDVWGQGTLVTVSS

SEQ ID NO: 319 - protein, 112 aa, Artificial Sequence; identical to SEQ ID NO: 61
  Description of Artificial Sequence: Synthetic polypeptide

SEQ ID NO: 320 - protein, 119 aa, Artificial Sequence
  Description of Artificial Sequence: Synthetic polypeptide
QVQLVQSGAEVKKPGASVKVSCKASGYTFTSYNMHWVRQAPGQRLEWMGSIDAGTGATDYSQKFQGRVTITRDTSASTAYMELSSLRSEDTAVYYCARDAYHHYFYDVWGQGTLVTVSS

SEQ ID NO: 321 - protein, 112 aa, Artificial Sequence; identical to SEQ ID NO: 61
  Description of Artificial Sequence: Synthetic polypeptide

SEQ ID NO: 322 - protein, 119 aa, Artificial Sequence
  Description of Artificial Sequence: Synthetic polypeptide
QVQLVQSGAEVKKPGASVKVSCKASGYTFTSYNMHWVRQAPGPRLEWMGWIDAGTGATHYSQKFQGRVTITRDTSASTAYMELSSLRSEDTAVYYCARDAYHHYFYDVWGQGTLVTVSS

SEQ ID NO: 323 - protein, 112 aa, Artificial Sequence; identical to SEQ ID NO: 61
  Description of Artificial Sequence: Synthetic polypeptide

SEQ ID NO: 324 - protein, 119 aa, Artificial Sequence
  Description of Artificial Sequence: Synthetic polypeptide
QVQLVQSGAEVKKPGASVKVSCKASGYTFTEYDMHWVRQAPGQTLEWMGWIDAGTGATVYSQKFQGRVTITRDTSASTAYMELSSLRSEDTAVYYCARDAYGRYFYDHWGQGTLVTVSS

SEQ ID NO: 325 - protein, 112 aa, Artificial Sequence; identical to SEQ ID NO: 61
  Description of Artificial Sequence: Synthetic polypeptide

SEQ ID NO: 326 - protein, 119 aa, Artificial Sequence
  Description of Artificial Sequence: Synthetic polypeptide
QVQLVQSGAEVKKPGASVKVSCKASGYTFDSYTMHWVRQAPGPRLEWMGSINAGTGNTDYSQKFQGRVTITRDTSASTAYMELSSLRSEDTAVYYCARDHYGHYFYDVWGQGTLVTVSS

SEQ ID NO: 327 - protein, 112 aa, Artificial Sequence; identical to SEQ ID NO: 61
  Description of Artificial Sequence: Synthetic polypeptide

SEQ ID NO: 328 - protein, 119 aa, Artificial Sequence
  Description of Artificial Sequence: Synthetic polypeptide
QVQLVQSGAEVKKPGASVKVSCKASGYTFTDDAMHWVRQAPGHRLEWMGWIDAGTGNTYYSQKFQGRVTITRDTSASTAYMELSSLRSEDTAVYYCAHDAYGHYFYDVWGQGTLVTVSS

SEQ ID NO: 329 - protein, 112 aa, Artificial Sequence; identical to SEQ ID NO: 61
  Description of Artificial Sequence: Synthetic polypeptide

SEQ ID NO: 330 - protein, 119 aa, Artificial Sequence; identical to SEQ ID NO: 218
  Description of Artificial Sequence: Synthetic polypeptide

SEQ ID NO: 331 - protein, 112 aa, Artificial Sequence; identical to SEQ ID NO: 197
  Description of Artificial Sequence: Synthetic polypeptide

SEQ ID NO: 332 - protein, 119 aa, Artificial Sequence
  Description of Artificial Sequence: Synthetic polypeptide
QVQLVQSGAEVKKPGASVKVSCKASGYTFTSDYMHWVRQAPGQRLEWMGWINAGTGATDYSQKFQGRVTITRDTSASTAYMELSSLRSEDTAVYYCAHDAYGRYHYDVWGQGTLVTVSS

SEQ ID NO: 333 - protein, 112 aa, Artificial Sequence; identical to SEQ ID NO: 61
  Description of Artificial Sequence: Synthetic polypeptide

SEQ ID NO: 334 - protein, 119 aa, Artificial Sequence
  Description of Artificial Sequence: Synthetic polypeptide
QVQLVQSGAEVKKPGASVKVSCKASGYTFADYAMHWVRQAPGHRLEWMGDIIAGTGATKYSQKFQGRVTITRDTSASTAYMELSSLRSEDTAVYYCARDHYGHYFYDVWGQGTLVTVSS

SEQ ID NO: 335 - protein, 112 aa, Artificial Sequence; identical to SEQ ID NO: 61
  Description of Artificial Sequence: Synthetic polypeptide

SEQ ID NO: 336 - protein, 119 aa, Artificial Sequence
  Description of Artificial Sequence: Synthetic polypeptide
QVQLVQSGAEVKKPGASVKVSCKASGYTFTGYEMHWVRQAPGQRLEWMGWINPSTGNTVYSQKFQGRVTITRDTSASTAYMELSSLRSEDTAVYYCARDHYGHYFYDVWGQGTLVTVSS

SEQ ID NO: 337 - protein, 112 aa, Artificial Sequence; identical to SEQ ID NO: 61
  Description of Artificial Sequence: Synthetic polypeptide

SEQ ID NO: 338 - protein, 119 aa, Artificial Sequence
  Description of Artificial Sequence: Synthetic polypeptide
QVQLVQSGAEVKKPGASVKVSCKASGYTFTDDAMHWVRQAPGQSLEWMGWIDAGTGNTYYSQKFQGRVTITRDTSASTAYMELSSLRSEDTAVYYCAHDAYGHYFYDVWGQGTLVTVSS

SEQ ID NO: 339 - protein, 112 aa, Artificial Sequence; identical to SEQ ID NO: 61
  Description of Artificial Sequence: Synthetic polypeptide

SEQ ID NO: 340 - protein, 119 aa, Artificial Sequence
  Description of Artificial Sequence: Synthetic polypeptide
QVQLVQSGAEVKKPGASVKVSCKASGYTFNNYAMHWVRQAPGQSLEWMGWIDAGTGNTDYSQKFQGRVTITRDTSASTAYMELSSLRSEDTAVYYCARDAHHRYFYDVWGQGTLVTVSS

SEQ ID NO: 341 - protein, 111 aa, Artificial Sequence
  Description of Artificial Sequence: Synthetic polypeptide
DIVMTQSPDSLAVSLGERATINCKSSQSLLNARTGKNYLAWYQQKPGQPPKLLIYWASTRESGVPDRFSGSGSGTDFTLTISSLQAEDVAVYYCKQSYSRRTFGGGTKVEI

SEQ ID NO: 342 - protein, 119 aa, Artificial Sequence
  Description of Artificial Sequence: Synthetic polypeptide
QVQLVQSGAEVKKPGASVKVSCKASGYTFTTYAMHWVRQAPGQRLEWMGWIDPVTGNTKYSQKFQGRVTITRDTSASTAYMELSSLRSEDTAVYYCARDHYGRYFYDHWGQGTLVTVSS

SEQ ID NO: 343 - protein, 112 aa, Artificial Sequence; identical to SEQ ID NO: 61
  Description of Artificial Sequence: Synthetic polypeptide

SEQ ID NO: 344 - protein, 119 aa, Artificial Sequence
  Description of Artificial Sequence: Synthetic polypeptide
QVQLVQSGAEVKKPGASVKVSCKASGYTFHSYNMHWVRQAPGHRLEWMGWINPDTGATDYSQKFQGRVTITRDTSASTAYMELSSLRSEDTAVYYCARDAYGRYFYDVWGQGTLVTVSS

SEQ ID NO: 345 - protein, 112 aa, Artificial Sequence; identical to SEQ ID NO: 61
  Description of Artificial Sequence: Synthetic polypeptide

SEQ ID NO: 346 - protein, 119 aa, Artificial Sequence
  Description of Artificial Sequence: Synthetic polypeptide
QVQLVQSGAEVKKPGASVKVSCKASGYTFTSYGMHWVRQAPGQRLEWMGWIDPVTGATDYSQKFQGRVTITRDTSASTAYMELSSLRSEDTAVYYCARDAHGRYFYDHWGQGTLVTVSS

SEQ ID NO: 347 - protein, 112 aa, Artificial Sequence; identical to SEQ ID NO: 61
  Description of Artificial Sequence: Synthetic polypeptide

SEQ ID NO: 348 - protein, 119 aa, Artificial Sequence
  Description of Artificial Sequence: Synthetic polypeptide
QVQLVQSGAEVKKPGASVKVSCKASGYTFTEYDMHWVRQAPGPTLEWMGWIDAGTGATVYSQKFQGRVTITRDTSASTAYMELSSLRSEDTAVYYCARDAYGRYFYDHWGQGTLVTVSS

SEQ ID NO: 349 - protein, 112 aa, Artificial Sequence; identical to SEQ ID NO: 61
  Description of Artificial Sequence: Synthetic polypeptide

SEQ ID NO: 350 - protein, 119 aa, Artificial Sequence
  Description of Artificial Sequence: Synthetic polypeptide
QVQLVQSGAEVKKPGASVKVSCKASGYTFHSYEMHWVRQAPGQRLEWMGWITAGTGSTKYSQKFQGRVTITRDTSASTAYMELSSLRSEDTAVYYCARDAYGHYFYDHWGQGTLVTVSS

SEQ ID NO: 351 - protein, 112 aa, Artificial Sequence; identical to SEQ ID NO: 61
  Description of Artificial Sequence: Synthetic polypeptide

SEQ ID NO: 352 - protein, 119 aa, Artificial Sequence
  Description of Artificial Sequence: Synthetic polypeptide
QVQLVQSGAEVKKPGASVKVSCKASGFNIKDYYMHWVRQAPGQRLEWMGWIDLENANTIYDAKFQGRVTITRDTSASTAYMELSSLRSEDTAVYYCARDHHGRYFYDVWGQGTLVTVSS

SEQ ID NO: 353 - protein, 112 aa, Artificial Sequence
  Description of Artificial Sequence: Synthetic polypeptide
DIVMTQSPDSLAVSLGERATINCKSSQSLLNAHTGKNYLAWYQQKPGQPPKLLIYWASTRESGVPDRFSGSGSGTDFTLTISSLQAEDVAVYYCKQSYSRRTFGGGTKVEIK

SEQ ID NO: 354 - protein, 119 aa, Artificial Sequence
  Description of Artificial Sequence: Synthetic polypeptide
QVQLVQSGAEVKKPGASVKVSCKASGYTFTGYEMHWVRQAPGQRLEWMGWINPVTGATAYSQKFQGRVTITRDTSASTAYMELSSLRSEDTAVYYCARDAYGHYFYDHWGQGTLVTVSS

SEQ ID NO: 355 - protein, 112 aa, Artificial Sequence; identical to SEQ ID NO: 61
  Description of Artificial Sequence: Synthetic polypeptide

SEQ ID NO: 356 - protein, 119 aa, Artificial Sequence
  Description of Artificial Sequence: Synthetic polypeptide
QVQLVQSGAEVKKPGASVKVSCKASGYTFDSIAMHWVRQAPGQRLEWMGWINPATGNTDYSQKFQGRVTITRDTSASTAYMELSSLRSEDTAVYYCARDAYGHYFYDHWGQGTLVTVSS

SEQ ID NO: 357 - protein, 112 aa, Artificial Sequence; identical to SEQ ID NO: 61
  Description of Artificial Sequence: Synthetic polypeptide

SEQ ID NO: 358 - protein, 119 aa, Artificial Sequence
  Description of Artificial Sequence: Synthetic polypeptide
QVQLVQSGAEVKKPGASVKVSCKASGYTFTEYVMHWVRQAPGQRLEWMGDIDAGTGATKYSQKFQGRVTITRDTSASTAYMELSSLRSEDTAVYYCARDAYHHYFYDVWGQGTLVTVSS

SEQ ID NO: 359 - protein, 112 aa, Artificial Sequence; identical to SEQ ID NO: 61
  Description of Artificial Sequence: Synthetic polypeptide

SEQ ID NO: 360 - protein, 119 aa, Artificial Sequence
  Description of Artificial Sequence: Synthetic polypeptide
QVQLVQSGAEVKKPGASVKVSCKASGYTFHSYDMHWVRQAPGQRLEWMGWIDAGTGATTYSQKFQGRVTITRDTSASTAYMELSSLRSEDTAVYYCARDAYGHYFYDVWGQGTLVTVSS

SEQ ID NO: 361 - protein, 112 aa, Artificial Sequence; identical to SEQ ID NO: 61
  Description of Artificial Sequence: Synthetic polypeptide

SEQ ID NO: 362 - protein, 119 aa, Artificial Sequence
  Description of Artificial Sequence: Synthetic polypeptide
QVQLVQSGAEVKKPGASVKVSCKASGYTFTEYVMHWVRQAPGPRLEWMGDIDAGTGATKYSQKFQGRVTITRDTSASTAYMELSSLRSEDTAVYYCARDAYHHYFYDVWGQGTLVTVSS

SEQ ID NO: 363 - protein, 112 aa, Artificial Sequence; identical to SEQ ID NO: 61
  Description of Artificial Sequence: Synthetic polypeptide

SEQ ID NO: 364 - protein, 119 aa, Artificial Sequence
  Description of Artificial Sequence: Synthetic polypeptide
QVQLVQSGAEVKKPGASVKVSCKASGYTFDSYEMHWVRQAPGHRLEWMGWINPLTGATKYSQKFQGRVTITRDTSASTAYMELSSLRSEDTAVYYCARDHYGHYFYDVWGQGTLVTVSS

SEQ ID NO: 365 - protein, 112 aa, Artificial Sequence; identical to SEQ ID NO: 61
  Description of Artificial Sequence: Synthetic polypeptide

SEQ ID NO: 366 - protein, 118 aa, Artificial Sequence
  Description of Artificial Sequence: Synthetic polypeptide
QVQLVQSGAEVKKPGASVKVSCKASGYTFNRYVMHWVRQAPGQRLEWMGGIDAGTGATKYSQKFQGRVTITRDTSASTAYMELSSLRSEDTAVYYCARDAHRHYFYDVWGQGTLVTVS

SEQ ID NO: 367 - protein, 112 aa, Artificial Sequence; identical to SEQ ID NO: 61
  Description of Artificial Sequence: Synthetic polypeptide

SEQ ID NO: 368 - protein, 119 aa, Artificial Sequence
  Description of Artificial Sequence: Synthetic polypeptide
QVQLVQSGAEVKKPGASVKVSCKASGYTFIKYVMHWVRQAPGQRLEWMGDIDPDTGATEYSQKFQGRVTITRDTSASTAYMELSSLRSEDTAVYYCARDDYHHYFYDVWGQGTLVTVSS

SEQ ID NO: 369 - protein, 112 aa, Artificial Sequence; identical to SEQ ID NO: 61
  Description of Artificial Sequence: Synthetic polypeptide

SEQ ID NO: 370 - protein, 119 aa, Artificial Sequence
  Description of Artificial Sequence: Synthetic polypeptide
QVQLVQSGAEVKKPGASVKVSCKASGYTFTAYDMHWVRQAPGQRLEWMGWINPDTGATVYSQKFQGRVTITRDTSASTAYMELSSLRSEDTAVYYCARDAYGRYFYDVWGQGTLVTVSS

SEQ ID NO: 371 - protein, 112 aa, Artificial Sequence; identical to SEQ ID NO: 61
  Description of Artificial Sequence: Synthetic polypeptide

SEQ ID NO: 372 - protein, 119 aa, Artificial Sequence
  Description of Artificial Sequence: Synthetic polypeptide
QVQLVQSGAEVKKPGASVKVSCKASGYTFTQYDMHWVRQAPGQTLEWMGDINAGTGVTVYSQKFQGRVTITRDTSASTAYMELSSLRSEDTAVYYCARDAYGRYFYDVWGQGTLVTVSS

SEQ ID NO: 373 - protein, 112 aa, Artificial Sequence; identical to SEQ ID NO: 61
  Description of Artificial Sequence: Synthetic polypeptide

SEQ ID NO: 374 - protein, 119 aa, Artificial Sequence
  Description of Artificial Sequence: Synthetic polypeptide
QVQLVQSGAEVKKPGASVKVSCKASGFNIKDYYMHWVRQAPGQRLEWMGWIDLENANTIYDAKFQGRVTITRDTSASTAYMELSSLRSEDTAVYYCARDAYGHYHYDVWGQGTLVTVSS

SEQ ID NO: 375 - protein, 112 aa, Artificial Sequence
  Description of Artificial Sequence: Synthetic polypeptide
DIVMTQSPDSLAVSLGERATINCKSSQSLLHARTGKNYLAWYQQKPGQPPKLLIYWASTRESGVPDRFSGSGSGTDFTLTISSLQAEDVAVYYCKQSYHHRTFGGGTKVEIK

SEQ ID NO: 376 - protein, 119 aa, Artificial Sequence
  Description of Artificial Sequence: Synthetic polypeptide
QVQLVQSGAEVKKPGASVKVSCKASGYTFESYDMHWVRQAPGQPLEWMGWIDAGTGATTYSQKFQGRVTITRDTSASTAYMELSSLRSEDTAVYYCARDAYHHYFYDVWGQGTLVTVSS

SEQ ID NO: 377 - protein, 112 aa, Artificial Sequence; identical to SEQ ID NO: 61
  Description of Artificial Sequence: Synthetic polypeptide

SEQ ID NO: 378 - protein, 119 aa, Artificial Sequence
  Description of Artificial Sequence: Synthetic polypeptide
QVQLVQSGAEVKKPGASVKVSCKASGYTFVSYDMHWVRQAPGPSLEWMGWIDPNTGATVYSQKFQGRVTITRDTSASTAYMELSSLRSEDTAVYYCARDHYGHYFYDVWGQGTLVTVSS

SEQ ID NO: 379 - protein, 112 aa, Artificial Sequence; identical to SEQ ID NO: 61
  Description of Artificial Sequence: Synthetic polypeptide

SEQ ID NO: 380 - protein, 119 aa, Artificial Sequence
  Description of Artificial Sequence: Synthetic polypeptide
QVQLVQSGAEVKKPGASVKVSCKASGYTFESYDMHWVRQAPGPRLEWMGWIDAGTGATTYSQKFQGRVTITRDTSASTAYMELSSLRSEDTAVYYCARDAYHHYFYDVWGQGTLVTVSS

SEQ ID NO: 381 - protein, 112 aa, Artificial Sequence; identical to SEQ ID NO: 61
  Description of Artificial Sequence: Synthetic polypeptide

SEQ ID NO: 382 - protein, 119 aa, Artificial Sequence
  Description of Artificial Sequence: Synthetic polypeptide
QVQLVQSGAEVKKPGASVKVSCKASGYTFTDYDMHWVRQAPGQRLEWMGWINAGDAATVYSQKFQGRVTITRDTSASTAYMELSSLRSEDTAVYYCARDAYGHYFYDHWGQGTLVTVSS

SEQ ID NO: 383 - protein, 112 aa, Artificial Sequence; identical to SEQ ID NO: 61
  Description of Artificial Sequence: Synthetic polypeptide

SEQ ID NO: 384 - protein, 119 aa, Artificial Sequence
  Description of Artificial Sequence: Synthetic polypeptide
QVQLVQSGAEVKKPGASVKVSCKASGYTFVSYNMHWVRQAPGQRLEWMGSINAGDANTKYSQKFQGRVTITRDTSASTAYMELSSLRSEDTAVYYCARDHYGHYFYDVWGQGTLVTVSS

SEQ ID NO: 385 - protein, 112 aa, Artificial Sequence; identical to SEQ ID NO: 61
  Description of Artificial Sequence: Synthetic polypeptide

SEQ ID NO: 386 - protein, 119 aa, Artificial Sequence
  Description of Artificial Sequence: Synthetic polypeptide
QVQLVQSGAEVKKPGASVKVSCKASGYTFESYDMHWVRQAPGQTLEWMGWIDAGTGATTYSQKFQGRVTITRDTSASTAYMELSSLRSEDTAVYYCARDAYHHYFYDVWGQGTLVTVSS

SEQ ID NO: 387 - protein, 112 aa, Artificial Sequence; identical to SEQ ID NO: 61
  Description of Artificial Sequence: Synthetic polypeptide

SEQ ID NO: 388 - protein, 119 aa, Artificial Sequence
  Description of Artificial Sequence: Synthetic polypeptide
QVQLVQSGAEVKKPGASVKVSCKASGYTFESYDMHWVRQAPGPRLEWMGWIDAGTGNTKYSQKFQGRVTITADESTSTAYMELSSLRSEDTAVYYCARDHYGHYFYDVWGQGTLVTVSS

SEQ ID NO: 389 - protein, 112 aa, Artificial Sequence; identical to SEQ ID NO: 61
  Description of Artificial Sequence: Synthetic polypeptide

SEQ ID NO: 390 - protein, 119 aa, Artificial Sequence
  Description of Artificial Sequence: Synthetic polypeptide
QVQLVQSGAEVKKPGASVKVSCKASGYTFTDYDMHWVRQAPGHRLEWMGWINAGDAATVYSQKFQGRVTITRDTSASTAYMELSSLRSEDTAVYYCARDAYGHYFYDHWGQGTLVTVSS

SEQ ID NO: 391 - protein, 112 aa, Artificial Sequence; identical to SEQ ID NO: 61
  Description of Artificial Sequence: Synthetic polypeptide

SEQ ID NO: 392 - protein, 119 aa, Artificial Sequence; identical to SEQ ID NO: 60
  Description of Artificial Sequence: Synthetic polypeptide

SEQ ID NO: 393 - protein, 112 aa, Artificial Sequence
  Description of Artificial Sequence: Synthetic polypeptide
DIVMTQSPDSLAVSLGERATINCKSSQSLLHARTHKNYLAWYQQKPGQPPKLLIYWASTRESGVPDRFSGSGSGTDFTLTISSLQAEDVAVYYCKQSYSRRTFGGGTKVEIK

SEQ ID NO: 394 - protein, 119 aa, Artificial Sequence; identical to SEQ ID NO: 60
  Description of Artificial Sequence: Synthetic polypeptide

SEQ ID NO: 395 - protein, 112 aa, Artificial Sequence
  Description of Artificial Sequence: Synthetic polypeptide
DIVMTQSPDSLAVSLGERATINCKSSQSLLHARTGHNYLAWYQQKPGQPPKLLIYWASTRESGVPDRFSGSGSGTDFTLTISSLQAEDVAVYYCKQSYSRRTFGGGTKVEIK

SEQ ID NO: 396 - protein, 119 aa, Artificial Sequence
  Description of Artificial Sequence: Synthetic polypeptide
QVQLVQSGAEVKKPGASVKVSCKASGFNIKDYYMHWVRQAPGQRLEWMGWIDLENANTIYDAKFQGRVTITRDTSASTAYMELSSLRSEDTAVYYCARDAYHRYFYDHWGQGTLVTVSS

SEQ ID NO: 397 - protein, 112 aa, Artificial Sequence; identical to SEQ ID NO: 395
  Description of Artificial Sequence: Synthetic polypeptide

SEQ ID NO: 398 - protein, 119 aa, Artificial Sequence; identical to SEQ ID NO: 60
  Description of Artificial Sequence: Synthetic polypeptide

SEQ ID NO: 399 - protein, 112 aa, Artificial Sequence
  Description of Artificial Sequence: Synthetic polypeptide
DIVMTQSPDSLAVSLGERATINCKSSQSLLHARTGKNHLAWYQQKPGQPPKLLIYWASTRESGVPDRFSGSGSGTDFTLTISSLQAEDVAVYYCKQSYSRRTFGGGTKVEIK

SEQ ID NO: 400 - protein, 119 aa, Artificial Sequence; identical to SEQ ID NO: 60
  Description of Artificial Sequence: Synthetic polypeptide

SEQ ID NO: 401 - protein, 112 aa, Artificial Sequence
  Description of Artificial Sequence: Synthetic polypeptide
DIVMTQSPDSLAVSLGERATINCKSSQSLLNAHTHKNYLAWYQQKPGQPPKLLIYWASTRESGVPDRFSGSGSGTDFTLTISSLQAEDVAVYYCKQSYSRRTFGGGTKVEIK

SEQ ID NO: 402 - protein, 119 aa, Artificial Sequence; identical to SEQ ID NO: 60
  Description of Artificial Sequence: Synthetic polypeptide

SEQ ID NO: 403 - protein, 112 aa, Artificial Sequence
  Description of Artificial Sequence: Synthetic polypeptide
DIVMTQSPDSLAVSLGERATINCKSSQSLLNARTHHNYLAWYQQKPGQPPKLLIYWASTRESGVPDRFSGSGSGTDFTLTISSLQAEDVAVYYCKQSYSRRTFGGGTKVEIK

SEQ ID NO: 404 - protein, 119 aa, Artificial Sequence; identical to SEQ ID NO: 60
  Description of Artificial Sequence: Synthetic polypeptide

SEQ ID NO: 405 - protein, 112 aa, Artificial Sequence
  Description of Artificial Sequence: Synthetic polypeptide
DIVMTQSPDSLAVSLGERATINCKSSQSLLNARTHKNHLAWYQQKPGQPPKLLIYWASTRESGVPDRFSGSGSGTDFTLTISSLQAEDVAVYYCKQSYSRRTFGGGTKVEIK

SEQ ID NO: 406 - protein, 119 aa, Artificial Sequence; identical to SEQ ID NO: 60
  Description of Artificial Sequence: Synthetic polypeptide

SEQ ID NO: 407 - protein, 111 aa, Artificial Sequence
  Description of Artificial Sequence: Synthetic polypeptide
DIVMTQSPDSLAVSLGERATINCKSSQSLLNAHTGKNYLAWYQQKPGQPPKLLIYWASTRESGVPDRFSGSGSGTDFTLTISSLQAEDVAVYYCKQSYSRRTFGGGTKVEI

SEQ ID NO: 408 - protein, 118 aa, Artificial Sequence
  Description of Artificial Sequence: Synthetic polypeptide
QVQLVQSGAEVKKPGASVKVSCKASGFNIKDYYMHWVRQAPGQRLEWMGWIDLENANTIYDAKFQGRVTITRDTSASTAYMELSSLRSEDTAVYYCARDAYGRYFYDVWGQGTLVTVS

SEQ ID NO: 409 - protein, 112 aa, Artificial Sequence
  Description of Artificial Sequence: Synthetic polypeptide
DIVMTQSPDSLAVSLGERATINCKSSQSLLNARTHKNYLAWYQQKPGQPPKLLIYWASTRESGVPDRFSGSGSGTDFTLTISSLQAEDVAVYYCKQSYSRRTFGGGTKVEIK

SEQ ID NO: 410 - protein, 119 aa, Artificial Sequence; identical to SEQ ID NO: 60
  Description of Artificial Sequence: Synthetic polypeptide

SEQ ID NO: 411 - protein, 112 aa, Artificial Sequence
  Description of Artificial Sequence: Synthetic polypeptide
DIVMTQSPDSLAVSLGERATINCKSSQSLLNARTGKNHLAWYQQKPGQPPKLLIYWASTRESGVPDRFSGSGSGTDFTLTISSLQAEDVAVYYCKQSYSRRTFGGGTKVEIK

SEQ ID NO: 412 - protein, 119 aa, Artificial Sequence; identical to SEQ ID NO: 60
  Description of Artificial Sequence: Synthetic polypeptide

SEQ ID NO: 413 - protein, 112 aa, Artificial Sequence
  Description of Artificial Sequence: Synthetic polypeptide
DIVMTQSPDSLAVSLGERATINCKSSQSLLNARTGHNYLAWYQQKPGQPPKLLIYWASTRESGVPDRFSGSGSGTDFTLTISSLQAEDVAVYYCKQSYSRRTFGGGTKVEIK

SEQ ID NO: 414 - protein, 119 aa, Artificial Sequence
  Description of Artificial Sequence: Synthetic polypeptide
QVQLVQSGTEVKKPGASVKVSCKASGFNIKDYYMHWVRQAPGQRLEWMGWIDLENANTIYDAKFQGRVTITRDTSASTAYMELSSLRSEDTAVYYCARDAYHRYFYDHWGQGTLVTVSS

SEQ ID NO: 415 - protein, 112 aa, Artificial Sequence
  Description of Artificial Sequence: Synthetic polypeptide
DIVMTQSPDSLAVSLGERATINCKSSQSLLNSHTGKNYLAWYQQKPGQPPKLLIYWASTRESGVPDRFSGSGSGTDFTLTISSLQAEDVAVYYCKQSYSRRTFGGGTKVEIK

SEQ ID NO: 416 - protein, 119 aa, Artificial Sequence
  Description of Artificial Sequence: Synthetic polypeptide
QVQLVQSGAEVKKPGASVKVSCKASGFNIKDYYMHWVRQAPGQRLEWMGWIDLENANTIYDAKFQGRVTITRDTSASTAYMELSSLRSEDTAVYYCARDAYGRHFYDHWGQGTLVTVSS

SEQ ID NO: 417 - protein, 112 aa, Artificial Sequence; identical to SEQ ID NO: 353
  Description of Artificial Sequence: Synthetic polypeptide

SEQ ID NO: 418 - protein, 119 aa, Artificial Sequence; identical to SEQ ID NO: 64
  Description of Artificial Sequence: Synthetic polypeptide

SEQ ID NO: 419 - protein, 111 aa, Artificial Sequence
  Description of Artificial Sequence: Synthetic polypeptide
DIVMTQSPDSLAVSLGERATINCKSSQSLLNARTGHNHLAWYQQKPGQPPKLLIYWASTRESGVPDRFSGSGSGTDFTLTISSLQAEDVAVYYCKQSHSHRTFGGGTKVEI

SEQ ID NO: 420 - protein, 119 aa, Artificial Sequence; identical to SEQ ID NO: 174
  Description of Artificial Sequence: Synthetic polypeptide

SEQ ID NO: 421 - protein, 112 aa, Artificial Sequence
  Description of Artificial Sequence: Synthetic polypeptide
DIVMTQSPDSLAVSLGERATINCKSSQSLLNARTGKNHLAWYQQKPGQPPKLLIYWASTRESGVPDRFSGSGSGTDFTLTISSLQAEDVAVYYCKQSYHHRTFGGGTKVEIK

SEQ ID NO: 422 - protein, 119 aa, Artificial Sequence; identical to SEQ ID NO: 396
  Description of Artificial Sequence: Synthetic polypeptide

SEQ ID NO: 423 - protein, 112 aa, Artificial Sequence; identical to SEQ ID NO: 87
  Description of Artificial Sequence: Synthetic polypeptide

SEQ ID NO: 424 - protein, 119 aa, Artificial Sequence
  Description of Artificial Sequence: Synthetic polypeptide
QVQLVQSGAEVKKPGASVKVSCKASGFNIKDYYMHWVRQAPGQRLEWMGWIDLENANTIYDAKFQGRVTITRDTSASTAYMELSSLRSEDTAVYYCARDAYGHYFYDHWGQGTLVTVSS

SEQ ID NO: 425 - protein, 112 aa, Artificial Sequence
  Description of Artificial Sequence: Synthetic polypeptide
GIVMTQSPDSLAVSLGERATINCKSSQSLLNAHTGKNHLAWYQQKPGQPPKLLIYWASTRESGVPDRFSGSGSGTDFTLTISSLQAEDVAVYYCKQSHSRRTFGGGTKVEIK

SEQ ID NO: 426 - protein, 119 aa, Artificial Sequence; identical to SEQ ID NO: 60
  Description of Artificial Sequence: Synthetic polypeptide

SEQ ID NO: 427 - protein, 112 aa, Artificial Sequence
  Description of Artificial Sequence: Synthetic polypeptide
DIVMTQSPDSLAVSLGERATINCKSSQSLLNARTHKNHLAWYQQKPGQPPKLLIYWASTRESGVPDRFSGSGSGTDFTLTISSLQAEDVAVYYCKQSHSRRHFGGGTKVEIK

SEQ ID NO: 428 - protein, 119 aa, Artificial Sequence
  Description of Artificial Sequence: Synthetic polypeptide
QVQLVQSGAEVKKPGASVKVSCKASGFNIKDYYMHWVRQAPGQRLEWMGWIDLENANTIYDAKFQGRVTITRDTSASTAYMELSSLRSEDTAVYYCARDAYGHHFYDVWGQGTLVTVSS

SEQ ID NO: 429 - protein, 112 aa, Artificial Sequence
  Description of Artificial Sequence: Synthetic polypeptide
DIVMTQSPDSLAVSLGERATINCKSSQSLLNRHTGKNYLAWYQQKPGQPPKLLIYWASTRESGVPDRFSGSGSGTDFTLTISSLQAEDVAVYYCKQSYSRRTFGGGTKVEIK

SEQ ID NO: 430 - protein, 119 aa, Artificial Sequence
  Description of Artificial Sequence: Synthetic polypeptide
QVQLVQSGAEVKKPGASVKVSCKASGFNIKDYYMHWVRQAPGQRLEWMGWIDLENANTIYDAKFQGRVTITRDTSASTAYMELSSLRSEDTAVYYCARDAYHRHFYDVWGQGTLVTVSS

SEQ ID NO: 431 - protein, 112 aa, Artificial Sequence
  Description of Artificial Sequence: Synthetic polypeptide
DIVMTQSPDSLAVSLGERATINCKSSQSLLNAHTGKNYLAWYQQKPGQPPKLLIYWASTRESGVPDRFSGSGSGTDFTLTISSLQAEDVAVYYCKQSYHHRTFGGGTKVEIK

SEQ ID NO: 432 - protein, 119 aa, Artificial Sequence
  Description of Artificial Sequence: Synthetic polypeptide
QVQLVQSGAEVKKPGASVKVSCKASGFNIKDYYMHWVRQAPGQRLEWMGWIDLENANTIYDAKFQGRVTITRDTSASTAYMELSSLRSEDTAVYYCARDAHGRYFYDVWGQGTLVTVSS

SEQ ID NO: 433 - protein, 112 aa, Artificial Sequence
  Description of Artificial Sequence: Synthetic polypeptide
DIVMTQSPDSLAVSLGERATINCKSSQSLLNARTGHNHLAWYQQKPGQPPKLLIYWASTRESGVPDRFSGSGSGTDFTLTISSLQAEDVAVYYCKQSYSRRTFGGGTKVEIK

SEQ ID NO: 434 - protein, 119 aa, Artificial Sequence; identical to SEQ ID NO: 64
  Description of Artificial Sequence: Synthetic polypeptide

SEQ ID NO: 435 - protein, 112 aa, Artificial Sequence
  Description of Artificial Sequence: Synthetic polypeptide
DIVMTQSPDSLAVSLGERATINCKSSQSLLNARTHKNHLAWYQQKPGQPPKLLIYWASTRESGVPDRFSGSGSGTDFTLTISSLQAEDVAVYYCKQSHSHRTFGGGTKVEIK

SEQ ID NO: 436 - protein, 119 aa, Artificial Sequence; identical to SEQ ID NO: 240
  Description of Artificial Sequence: Synthetic polypeptide

SEQ ID NO: 437 - protein, 112 aa, Artificial Sequence
  Description of Artificial Sequence: Synthetic polypeptide
DIVMTQSPDSLAVSLGERATINCKSSQSLLHTRTGKNYLAWYQQKPGQPPKLLIYWASTRESGVPDRFSGSGSGTDFTLTISSLQAEDVAVYYCKQSYSRRTFGGGTKVEIK

SEQ ID NO: 438 - protein, 119 aa, Artificial Sequence
  Description of Artificial Sequence: Synthetic polypeptide
QVQLVQSGAEVKKPGASVKVSCKASGFNIKDYYMHWVRQAPGQRLEWMGWIDLENANTIYDAKFQGRVTITRDTSASTAYMELSSLRSEDTAVYYCARDHYGRYFYDHWGQGTLVTVSS

SEQ ID NO: 439 - protein, 112 aa, Artificial Sequence
  Description of Artificial Sequence: Synthetic polypeptide
DIVMTQSPDSLAVSLGERATINCKSSQSLLNAHTGKNHLAWYQQKPGQPPKLLIYWASTRESGVPDRFSGSGSGTDFTLTISSLQAEDVAVYYCKQSHHRRTFGGGTKVEIK

SEQ ID NO: 440 - protein, 119 aa, Artificial Sequence; identical to SEQ ID NO: 130
  Description of Artificial Sequence: Synthetic polypeptide

SEQ ID NO: 441 - protein, 112 aa, Artificial Sequence
  Description of Artificial Sequence: Synthetic polypeptide
DIVMTQSPDSLAVSLGERATINCKSSQSLLNAHTGKNYLAWYQQKPGQPPKLLIYWASTRESGVPDRFSGSGSGTDFTLTISSLQAEDVAVYYCHQSHSRRTFGGGTKVEIK

SEQ ID NO: 442 - protein, 119 aa, Artificial Sequence; identical to SEQ ID NO: 152
  Description of Artificial Sequence: Synthetic polypeptide

SEQ ID NO: 443 - protein, 112 aa, Artificial Sequence
  Description of Artificial Sequence: Synthetic polypeptide
DIVMTQSPDCLAVSLGERATINCKSSQSLLNARTGHNYLAWYQQKPGQPPKLLIYWASTRESGVPDRFSGSGSGTDFTLTISSLQAEDVAVYYCKQSHSHRTFGGGTKVEIK

SEQ ID NO: 444 - protein, 119 aa, Artificial Sequence; identical to SEQ ID NO: 64
  Description of Artificial Sequence: Synthetic polypeptide

SEQ ID NO: 445 - protein, 112 aa, Artificial Sequence
  Description of Artificial Sequence: Synthetic polypeptide
DIVMTQSPDSLAVSLGERATINCKSSQSLLNAHEGKNYLAWYQQKPGQPPKLLIYWASTRESGVPDRFSGSGSGTDFTLTISSLQAEDVAVYYCKQSHSHRTFGGGTKVEIK

SEQ ID NO: 446 - protein, 118 aa, Artificial Sequence
  Description of Artificial Sequence: Synthetic polypeptide
QVQLVQSGAEVKKPGASVKVSCKASGFNIKDYYMHWVRQAPGQRLEWMGWIDLENANTIYDAKFQGRVTITRDTSASTAYMELSSLRSEDTAVYYCARDAYGRYHYDHWGQGTLVTVS

SEQ ID NO: 447 - protein, 112 aa, Artificial Sequence
  Description of Artificial Sequence: Synthetic polypeptide
DIVMTQSPDSLAVSLGERATINCKSSQSLLHAHTGKNYLAWYQQKPGQPPKLLIYWASTRESGVPDRFSGSGSGTDFTLTISSLQAEDVAVYYCKQSYHHRTFGGGTKVEIK

SEQ ID NO: 448 - protein, 119 aa, Artificial Sequence; identical to SEQ ID NO: 62
  Description of Artificial Sequence: Synthetic polypeptide

SEQ ID NO: 449 - protein, 112 aa, Artificial Sequence; identical to SEQ ID NO: 433
  Description of Artificial Sequence: Synthetic polypeptide

SEQ ID NO: 450 - protein, 119 aa, Artificial Sequence; identical to SEQ ID NO: 130
  Description of Artificial Sequence: Synthetic polypeptide

SEQ ID NO: 451 - protein, 112 aa, Artificial Sequence
  Description of Artificial Sequence: Synthetic polypeptide
DIVMTQSPDSLAVSLGERATINCKSSQSLLNAHTGHNYLAWYQQKPGQPPKLLIYWASTRESGVPDRFSGSGSGTDFTLTISSLQAEDVAVYYCHQSYSHRTFGGGTKVEIK

SEQ ID NO: 452 - protein, 119 aa, Artificial Sequence; identical to SEQ ID NO: 174
  Description of Artificial Sequence: Synthetic polypeptide

SEQ ID NO: 453 - protein, 112 aa, Artificial Sequence
  Description of Artificial Sequence: Synthetic polypeptide
DIVMTQSPDSLAVSLGERATINCKSSQSLLHARTGKNHLAWYQQKPGQPPKLLIYWASTRESGVPDRFSGSGSGTDFTLTISSLQAEDVAVYYCKQSHSHRTFGGGTKVEIK

SEQ ID NO: 454 - protein, 119 aa, Artificial Sequence
  Description of Artificial Sequence: Synthetic polypeptide
QVQLVQSGAEVKKPGASVKVSCKASGFNIKDYYMHWVRQAPGQRLEWMGWIDLENANTIYDAKFQGRVTITRDTAASTAYMELSSLRSEDTAVYYCARDHYHRYFYDHWGQGTLVTVSS

SEQ ID NO: 455 - protein, 112 aa, Artificial Sequence; identical to SEQ ID NO: 197
  Description of Artificial Sequence: Synthetic polypeptide

SEQ ID NO: 456 - protein, 119 aa, Artificial Sequence; identical to SEQ ID NO: 130
  Description of Artificial Sequence: Synthetic polypeptide

SEQ ID NO: 457 - protein, 112 aa, Artificial Sequence
  Description of Artificial Sequence: Synthetic polypeptide
DIVMTQSPDSLAVSLGERATINCKSSQSLLNAHTGKNHLAWYQQKPGQPPKLLIYWASTRESGVPDRFSGSGSGTDFTLTISSLQAEDVAVYYCKQSYHRRHFGGGTKVEIK

SEQ ID NO: 458 - protein, 119 aa, Artificial Sequence; identical to SEQ ID NO: 130
  Description of Artificial Sequence: Synthetic polypeptide

SEQ ID NO: 459 - protein, 112 aa, Artificial Sequence
  Description of Artificial Sequence: Synthetic polypeptide
DIVMTQSPDSLAVSLGERATINCKSSQSLLNAHTGKNHLAWYQQKPGQPPKLLIYWASTRESGVPDRFSGSGSGTDFTLTISSLQAEDVAVYYCKQSYSRRHFGGGTKVEIK

SEQ ID NO: 460 - protein, 119 aa, Artificial Sequence; identical to SEQ ID NO: 130
  Description of Artificial Sequence: Synthetic polypeptide

SEQ ID NO: 461 - protein, 112 aa, Artificial Sequence; identical to SEQ ID NO: 453
  Description of Artificial Sequence: Synthetic polypeptide

SEQ ID NO: 462 - protein, 119 aa, Artificial Sequence; identical to SEQ ID NO: 108
  Description of Artificial Sequence: Synthetic polypeptide

SEQ ID NO: 463 - protein, 112 aa, Artificial Sequence
  Description of Artificial Sequence: Synthetic polypeptide
DIVMTQSPDSLAVSLGERATINCKSSQSLLNARTGHNHLAWYQQKPGQPPKLLIYWASTRESGVPDRFSGSGSGTDFTLTISSLQAEDVAVYYCHQSHSRRTFGGGTKVEIK

SEQ ID NO: 464 - protein, 119 aa, Artificial Sequence; identical to SEQ ID NO: 438
  Description of Artificial Sequence: Synthetic polypeptide

SEQ ID NO: 465 - protein, 112 aa, Artificial Sequence
  Description of Artificial Sequence: Synthetic polypeptide
DIVMTQSPDSLAVSLGERATINCKSSQSLLNARTGHNHLAWYQQKPGQPPKLLIYWASTRESGVPDRFSGSGSGTDFTLTISSLQAEDVAVYYCKQSYHHRTFGGGTKVEIK

SEQ ID NO: 466 - protein, 119 aa, Artificial Sequence; identical to SEQ ID NO: 424
  Description of Artificial Sequence: Synthetic polypeptide

SEQ ID NO: 467 - protein, 112 aa, Artificial Sequence
  Description of Artificial Sequence: Synthetic polypeptide
DIVMTQSPDSLAVSLGERATINCKSSQSLLNAHTGKNHLAWYQQKPGQPPKLLIYWASTRESGVPDRFSGSGSGTDFTLTISSLQAEDVAVYYCKQSYHHRTFGGGTKVEIK

SEQ ID NO: 468 - protein, 119 aa, Artificial Sequence; identical to SEQ ID NO: 396
  Description of Artificial Sequence: Synthetic polypeptide

SEQ ID NO: 469 - protein, 112 aa, Artificial Sequence; identical to SEQ ID NO: 467
  Description of Artificial Sequence: Synthetic polypeptide

SEQ ID NO: 470 - protein, 119 aa, Artificial Sequence
  Description of Artificial Sequence: Synthetic polypeptide
QVQLVQSGAEVKKPGASVKVSCKASGFNIKDYHMHWVRQAPGQRLEWMGWIDLENANTIYDAKFQGRVTITRDTSASTAYMELSSLRSEDTAVYYCARDAHHRYFYDVWGQGTLVTVSS

SEQ ID NO: 471 - protein, 112 aa, Artificial Sequence; identical to SEQ ID NO: 87
  Description of Artificial Sequence: Synthetic polypeptide

SEQ ID NO: 472 - protein, 118 aa, Artificial Sequence
  Description of Artificial Sequence: Synthetic polypeptide
QVQLVQSGAEVKKPGASVKVSCKASGFNIKDYYMHWVRQAPGQRLEWMGWIDLENANTIYDAKFQGRVTITRDTSASTAYMELSSLRSEDTAVYYCARDAYGHYHYDVWGQGTLVTVS

SEQ ID NO: 473 - protein, 112 aa, Artificial Sequence; identical to SEQ ID NO: 465
  Description of Artificial Sequence: Synthetic polypeptide

SEQ ID NO: 474 - protein, 119 aa, Artificial Sequence; identical to SEQ ID NO: 374
  Description of Artificial Sequence: Synthetic polypeptide

SEQ ID NO: 475 - protein, 112 aa, Artificial Sequence
  Description of Artificial Sequence: Synthetic polypeptide
DIVMTQSPDSLAVSLGERATINCKSSQSLLNAHPGKNYLAWYQQKPGQPPKLLIYWASTRESGVPDRFSGSGSGTDFTLTISSLQAEDVAVYYCHQSYHRRTFGGGTKVEIK

SEQ ID NO: 476 - protein, 119 aa, Artificial Sequence; identical to SEQ ID NO: 174
  Description of Artificial Sequence: Synthetic polypeptide

SEQ ID NO: 477 - protein, 112 aa, Artificial Sequence; identical to SEQ ID NO: 451
  Description of Artificial Sequence: Synthetic polypeptide

SEQ ID NO: 478 - protein, 119 aa, Artificial Sequence
  Description of Artificial Sequence: Synthetic polypeptide
QVQLVQSGAEVKKPGASVKVSCKASGFNIKDYYMHWVRQAPGQRLEWMGWIDLENANTIYDAKFQGRVTITRDTSASTAYMELSSLRSEDTAVYYCARDAYGRYHHDVWGQGTLVTVSS

SEQ ID NO: 479 - protein, 112 aa, Artificial Sequence
  Description of Artificial Sequence: Synthetic polypeptide
DIVMTQSPDSLAVSLGERATINCKSSQSLLNARTGHNHLAWYQQKPGQPPKLLIYWASTRESGVPDRFSGSGSGTDFTLTISSLQAEDVAVYYCHQSYHRRTFGGGTKVEIK

SEQ ID NO: 480 - protein, 119 aa, Artificial Sequence; identical to SEQ ID NO: 374
  Description of Artificial Sequence: Synthetic polypeptide

SEQ ID NO: 481 - protein, 112 aa, Artificial Sequence; identical to SEQ ID NO: 399
  Description of Artificial Sequence: Synthetic polypeptide

SEQ ID NO: 482 - protein, 119 aa, Artificial Sequence; identical to SEQ ID NO: 62
  Description of Artificial Sequence: Synthetic polypeptide

SEQ ID NO: 483 - protein, 111 aa, Artificial Sequence
  Description of Artificial Sequence: Synthetic polypeptide
DIVMTQSPDSLAVSLGERATINCKSSQSLLNARTGHNYLAWYQQKPGQPPKLLISGSTRESGVPDRFSGSGSGTDFTLTISSLQAEDVAVYYCHQSYHRRTFGGGTKVEIK

SEQ ID NO: 484 - protein, 119 aa, Artificial Sequence; identical to SEQ ID NO: 284
  Description of Artificial Sequence: Synthetic polypeptide

SEQ ID NO: 485 - protein, 112 aa, Artificial Sequence; identical to SEQ ID NO: 405
  Description of Artificial Sequence: Synthetic polypeptide

SEQ ID NO: 486 - protein, 119 aa, Artificial Sequence; identical to SEQ ID NO: 174
  Description of Artificial Sequence: Synthetic polypeptide

SEQ ID NO: 487 - protein, 112 aa, Artificial Sequence; identical to SEQ ID NO: 197
  Description of Artificial Sequence: Synthetic polypeptide

SEQ ID NO: 488 - protein, 119 aa, Artificial Sequence; identical to SEQ ID NO: 86
  Description of Artificial Sequence: Synthetic polypeptide

SEQ ID NO: 489 - protein, 112 aa, Artificial Sequence
  Description of Artificial Sequence: Synthetic polypeptide
DIVMTQSPDSLAVSLGERATINCKSSQSLLHAHTGKNYLAWYQQKPGQPPKLLIYWASTRESGVPDRFSGSGSGTDFTLTISSLQAEDVAVYYCKQSHSHRTFGGGTKVEIK

SEQ ID NO: 490 - protein, 119 aa, Artificial Sequence
  Description of Artificial Sequence: Synthetic polypeptide
QVQLVQSGAEVKKPGASVKVSCKASGFNIKDYYMHWVRQAPGQRLEWMGWIDLENANTIYDAKFQGRVTITRDTSASTAYMELSSLRSEDTAVYYCARDHYGRHFYDVWGQGTLVTVSS

SEQ ID NO: 491 - protein, 112 aa, Artificial Sequence
  Description of Artificial Sequence: Synthetic polypeptide
DIVMTQSPDSLAVSLGERATINCKSSQSLLNARTGHNHLAWYQQKPGQPPKLLIYWASTRESGVPDRFSGSGSGTDFTLTISSLQAEDVAVYYCKQSHHRRTFGGGTKVEIK

SEQ ID NO: 492 - protein, 119 aa, Artificial Sequence; identical to SEQ ID NO: 130
  Description of Artificial Sequence: Synthetic polypeptide

SEQ ID NO: 493 - protein, 112 aa, Artificial Sequence; identical to SEQ ID NO: 197
  Description of Artificial Sequence: Synthetic polypeptide

SEQ ID NO: 494 - protein, 119 aa, Artificial Sequence; identical to SEQ ID NO: 352
  Description of Artificial Sequence: Synthetic polypeptide

SEQ ID NO: 495 - protein, 112 aa, Artificial Sequence; identical to SEQ ID NO: 433
  Description of Artificial Sequence: Synthetic polypeptide

SEQ ID NO: 496 - protein, 119 aa, Artificial Sequence
  Description of Artificial Sequence: Synthetic polypeptide
QVQLVQSGAEVKKPGASVKVSCKASGFNIKDYYMHWVRQAPGQRLEWMGWIDLENANTIYDAKFQGRVTITRDTSASTAYMELSSLRSEDTAVYYCARDAYGHYFYDVWGQGTLVTVSS

SEQ ID NO: 497 - protein, 112 aa, Artificial Sequence
  Description of Artificial Sequence: Synthetic polypeptide
DIVMTQSPDSLAVSLGERATINCKSSQSLLNARTGHNHLAWYQQKPGQPPKLLIYWASTRESGVPDRFSGSGSGTDFTLTISSLQAEDVAVYYCHQSYSHRTFGGGTKVEIK

SEQ ID NO: 498 - protein, 119 aa, Artificial Sequence; identical to SEQ ID NO: 424
  Description of Artificial Sequence: Synthetic polypeptide

SEQ ID NO: 499 - protein, 112 aa, Artificial Sequence; identical to SEQ ID NO: 497
  Description of Artificial Sequence: Synthetic polypeptide

SEQ ID NO: 500 - protein, 119 aa, Artificial Sequence
  Description of Artificial Sequence: Synthetic polypeptide
QVQLVQSGAEVKKPGASVKVSCKASGFNTKDYYMHWVRQAPGQRLEWMGWIDLENANTIYDAKFQGRVTITRDTSASTAYMELSSLRSEDTAVYYCARDAHGRYHYDVWGQGTLVTVSS

SEQ ID NO: 501 - protein, 112 aa, Artificial Sequence; identical to SEQ ID NO: 433
  Description of Artificial Sequence: Synthetic polypeptide

SEQ ID NO: 502 - protein, 119 aa, Artificial Sequence
  Description of Artificial Sequence: Synthetic polypeptide
QVQLVQSGAEVKKPGASVKVSCKASGFNIKDYYMHWVRQAPGQRLEWMGWIDLENANTIYDAKFQGRVTITRDASASTAYMELSSLRSEDTAVYYCARDAYHRYHYDVWGQGTLVTVSS

SEQ ID NO: 503 - protein, 112 aa, Artificial Sequence
  Description of Artificial Sequence: Synthetic polypeptide
DIVMTQSPDSLAVSLGERATINCKSSQSLLNAHTGKNHLAWYQQKPGQPPKLLIYWASTRESGVPDRFSGSGSGTDFTLTISSLQAEDVAVYYCKQSHSRRTFGGGTKVEIK

SEQ ID NO: 504 - protein, 119 aa, Artificial Sequence; identical to SEQ ID NO: 438
  Description of Artificial Sequence: Synthetic polypeptide

SEQ ID NO: 505 - protein, 112 aa, Artificial Sequence
  Description of Artificial Sequence: Synthetic polypeptide
DIVMTQYPDSLAVSLGERATINCKSSQSLLNAHTGHNYLAWYQQKPGQPPKLLIYWASTRESGVPDRFSGSGSGTDFTLTISSLQAEDVAVYYCHQSYSHRTFGGGTKVEIK

SEQ ID NO: 506 - protein, 119 aa, Artificial Sequence; identical to SEQ ID NO: 430
  Description of Artificial Sequence: Synthetic polypeptide

SEQ ID NO: 507 - protein, 112 aa, Artificial Sequence
  Description of Artificial Sequence: Synthetic polypeptide
DIVMTQSPDSLAVSLGERATINCKSSQSLLHPRTGKNYLAWYQQKPGQPPKLLIYWASTRESGVPDRFSGSGSGTDFTLTISSLQAEDVAVYYCKQSYHHRTFGGGTKVEIK

SEQ ID NO: 508 - protein, 119 aa, Artificial Sequence; identical to SEQ ID NO: 352
  Description of Artificial Sequence: Synthetic polypeptide

SEQ ID NO: 509 - protein, 112 aa, Artificial Sequence
  Description of Artificial Sequence: Synthetic polypeptide
DIVMTQSPDSLAVSLGERATINCKSSQSLLHARTGHNYLAWYQQKPGQPPKLLIYWASTRESGVPDRFSGSGSGTDFTLTISSLQAEDVAVYYCKQSHSHRTFGGGTKVEIK

SEQ ID NO: 510 - protein, 119 aa, Artificial Sequence; identical to SEQ ID NO: 64
  Description of Artificial Sequence: Synthetic polypeptide

SEQ ID NO: 511 - protein, 112 aa, Artificial Sequence; identical to SEQ ID NO: 467
  Description of Artificial Sequence: Synthetic polypeptide

SEQ ID NO: 512 - protein, 119 aa, Artificial Sequence; identical to SEQ ID NO: 374
  Description of Artificial Sequence: Synthetic polypeptide

SEQ ID NO: 513 - protein, 112 aa, Artificial Sequence; identical to SEQ ID NO: 197
  Description of Artificial Sequence: Synthetic polypeptide

SEQ ID NO: 514 - protein, 119 aa, Artificial Sequence
  Description of Artificial Sequence: Synthetic polypeptide
QVQLVQSGAEVKKPGASVKVSCKASGFNIKDYYMHWVRQAPGQRLEWMGWIDLENANTIYDAKFQGRVTITRDTSASTAYMELSSLRSEDTAVYYCARDAHGRYFHDVWGQGTLVTVSS

SEQ ID NO: 515 - protein, 112 aa, Artificial Sequence
  Description of Artificial Sequence: Synthetic polypeptide
DIVMTQSPDSLAVSLGERATINCKSSQSLLNAHTGKNHLAWYQQKPGQPPKLLIYWASTRESGVPDRFSGSGSGTDFTLTISSLQAEDVAVYYCHQSYSHRTFGGGTKVEIK

SEQ ID NO: 516 - protein, 119 aa, Artificial Sequence
  Description of Artificial Sequence: Synthetic polypeptide
QVQLVQSGAEVKKPGASVKVSCKASGYTFASYAMHWVRQAPGQRLEWMGWINPDTGNTVYSQKFQGRVTITRDTSASTAYMELSSLRSEDTAVYYCARDAYHHYFYDVWGQGTLVTVSS

SEQ ID NO: 517 - protein, 112 aa, Artificial Sequence; identical to SEQ ID NO: 61
  Description of Artificial Sequence: Synthetic polypeptide

SEQ ID NO: 518 - protein, 119 aa, Artificial Sequence
  Description of Artificial Sequence: Synthetic polypeptide
QVQLVQSGAEVKKPGASVKVSCKASGYTFTDYDMHWVRQAPGQRLEWMGWIDAGTGLTKYSQKFQGRVTITRDTSASTAYMELSSLRSEDTAVYYCARDHYGHYFYDVWGQGTLVTVSS

SEQ ID NO: 519 - protein, 112 aa, Artificial Sequence; identical to SEQ ID NO: 61
  Description of Artificial Sequence: Synthetic polypeptide

SEQ ID NO: 520 - protein, 119 aa, Artificial Sequence
  Description of Artificial Sequence: Synthetic polypeptide
QVQLVQSGAEVKKPGASVKVSCKASGYTFKSYDMHWVRQAPGQRLEWMGWIDAGTGNTKYSQKFQGRVTITRDTSASTAYMELSSLRSEDTAVYYCARDAYGRYFYDVWGQGTLVTVSS

SEQ ID NO: 521 - protein, 112 aa, Artificial Sequence; identical to SEQ ID NO: 61
  Description of Artificial Sequence: Synthetic polypeptide

SEQ ID NO: 522 - protein, 119 aa, Artificial Sequence
  Description of Artificial Sequence: Synthetic polypeptide
QVQLVQSGAEVKKPGASVKVSCKASGYTFDAYAMHWVRQAPGQRLEWMGWIDAGTGATAYSQKFQGRVTITRDTSASTAYMELSSLRSEDTAVYYCARDHYGHYFYDVWGQGTLVTVSS

SEQ ID NO: 523 - protein, 112 aa, Artificial Sequence; identical to SEQ ID NO: 61
  Description of Artificial Sequence: Synthetic polypeptide

SEQ ID NO: 524 - protein, 119 aa, Artificial Sequence
  Description of Artificial Sequence: Synthetic polypeptide
QVQLVQSGAEVKKPGASVKVSCKASGYTFQSYDMHWVRQAPGQRLQWMGWINPTTGNTVYSQKFQGRVTITRDTSASTAYMELSSLRSEDTAVYYCARDAYGRYFYDVWGQGTLVTVSS

SEQ ID NO: 525 - protein, 112 aa, Artificial Sequence; identical to SEQ ID NO: 61
  Description of Artificial Sequence: Synthetic polypeptide

SEQ ID NO: 526 - protein, 119 aa, Artificial Sequence
  Description of Artificial Sequence: Synthetic polypeptide
QVQLVQSGAEVKKPGASVKVSCKASGYTFTSADMHWVRQAPGQRLQPMGWINAGTGATKYSQKFQGRVTITRDTSANTAYMELSSLRSEDTAVYYCARDAYGRYFYDVWGQGTLVTVSS

SEQ ID NO: 527 - protein, 112 aa, Artificial Sequence; identical to SEQ ID NO: 61
  Description of Artificial Sequence: Synthetic polypeptide

SEQ ID NO: 528 - protein, 119 aa, Artificial Sequence
  Description of Artificial Sequence: Synthetic polypeptide
QVQLVQSGAEVKKPGASVKVSCKASGYTFDDYAMHWVRQAPGQRLEWMGWIDAGTGDTKYSQKFQGRVTITRDTSASTAYMELSSLRSEDTAVYYCARDHYHRYFYDVWGQGTLVTVSS

SEQ ID NO: 529 - protein, 112 aa, Artificial Sequence; identical to SEQ ID NO: 61
  Description of Artificial Sequence: Synthetic polypeptide

SEQ ID NO: 530 - protein, 119 aa, Artificial Sequence
  Description of Artificial Sequence: Synthetic polypeptide
QVQLVQSGAEVKKPGASVKVSCKASGYTFTEYEMHWVRQAPGQRLEWMGWINPLTGNTKYSQKFQGRVTITRDTSASTAYMELSSLRSEDTAVYYCARDHYGHYFYDVWGQGTLVTVSS

SEQ ID NO: 531 - protein, 112 aa, Artificial Sequence; identical to SEQ ID NO: 61
  Description of Artificial Sequence: Synthetic polypeptide

SEQ ID NO: 532 - protein, 119 aa, Artificial Sequence; identical to SEQ ID NO: 108
  Description of Artificial Sequence: Synthetic polypeptide

SEQ ID NO: 533 - protein, 112 aa, Artificial Sequence
  Description of Artificial Sequence: Synthetic polypeptide
DIVMTQSPDSLAVSLGERATINCKSSQSLLNARTHKNHLAWYQQKPGQPPKLLIYWASTRESGVPDRFSGSGSGTDFTLTISSLQAEDVAVYYCKQSYHHRTFGGGTKVEIK

SEQ ID NO: 534 - protein, 119 aa, Artificial Sequence
  Description of Artificial Sequence: Synthetic polypeptide
QVQLVQSGAEVKKPGASVKVSCKASGYTFTEYNMHWVRQAPGQRLEWMGWINPLTGNTLYSQKFQGRVTITRDTSASTAYMELSSLRSEDTAVYYCARDAYHHYFYDVWGQGTLVTVSS

SEQ ID NO: 535 - protein, 112 aa, Artificial Sequence; identical to SEQ ID NO: 61
  Description of Artificial Sequence: Synthetic polypeptide

SEQ ID NO: 536 - protein, 119 aa, Artificial Sequence
  Description of Artificial Sequence: Synthetic polypeptide
QVQLVQSGAEVKKPGASVKVSCKASGYTFTEYDMHWVRQAPGQRPEWMGWIDAGTGATVYSQKFQGRVTITRDTSASTAYMELSSLRSEDTAVYYCARDAYGRYFYDHWGQGTLVTVSS

SEQ ID NO: 537 - protein, 112 aa, Artificial Sequence; identical to SEQ ID NO: 61
  Description of Artificial Sequence: Synthetic polypeptide

SEQ ID NO: 538 - protein, 119 aa, Artificial Sequence
  Description of Artificial Sequence: Synthetic polypeptide
QVQLVQSGAEVKKPGASVKVSCKASGYTFTSDFMHWVRQAPGQRLEWMGWINPATGATKYSQKFQGRVTITRDTSASTAYMELSSLRSEDTAVYYCARDAYGHYFYDHWGQGTLVTVSS

SEQ ID NO: 539 - protein, 112 aa, Artificial Sequence; identical to SEQ ID NO: 61
  Description of Artificial Sequence: Synthetic polypeptide

SEQ ID NO: 540 - protein, 119 aa, Artificial Sequence
  Description of Artificial Sequence: Synthetic polypeptide
QVQLVQSGAEVKKPGASVKVSCKASGYTFESYDMHWVRQAPGQRLEWMGWIDAGTGNTKYSQKFQGRVTITADESTSTAYMELSSLRSEDTAVYYCARDHYGHYFYDVWGQGTLVTVSS

SEQ ID NO: 541 - protein, 112 aa, Artificial Sequence; identical to SEQ ID NO: 61
  Description of Artificial Sequence: Synthetic polypeptide

SEQ ID NO: 542 - protein, 119 aa, Artificial Sequence
  Description of Artificial Sequence: Synthetic polypeptide
QVQLVQSGAEVKKPGASVKVSCKASGYTFTDYAMHWVRQAPGQRLEWMGWINPSTGATVYSQKFQGRVTITRDTSASTAYMELSSLRSEDTAVYYCARDAYHHYFYDVWGQGTLVTVSS

SEQ ID NO: 543 - protein, 112 aa, Artificial Sequence; identical to SEQ ID NO: 61
  Description of Artificial Sequence: Synthetic polypeptide

SEQ ID NO: 544 - protein, 119 aa, Artificial Sequence
  Description of Artificial Sequence: Synthetic polypeptide
QVQLVQSGAEVKKPGASVKVSCKASGYTFNAYAMHWVRQAPGQRLEWMGWINPDTGATTYSQKFQGRVTITRDTSASTAYMELSSLRSEDTAVYYCARDAYHHYFYDVWGQGTLVTVSS

SEQ ID NO: 545 - protein, 112 aa, Artificial Sequence; identical to SEQ ID NO: 61
  Description of Artificial Sequence: Synthetic polypeptide

SEQ ID NO: 546 - protein, 119 aa, Artificial Sequence
  Description of Artificial Sequence: Synthetic polypeptide
QVQLVQSGAEVKKPGASVKVSCKASGYTFTDYDMHWVRQAPGQRLEWMGWIDPYTGATKYSQKFQGRVTITRDTSASTAYMELSSLRSEDTAVYYCARDAYGHYFYDVWGQGTLVTVSS

SEQ ID NO: 547 - protein, 112 aa, Artificial Sequence; identical to SEQ ID NO: 61
  Description of Artificial Sequence: Synthetic polypeptide

SEQ ID NO: 548 - protein, 119 aa, Artificial Sequence
  Description of Artificial Sequence: Synthetic polypeptide
QVQLVQSGAEVKKPGASVKVSCKASGYTFTSYNMHWVRQAPGQRLEWMGWIDAGTGATHYSQKFQGRVTITRDTSASTAYMELSSLRSEDTAVYYCARDAYHHYFYDVWGQGTLVTVSS

SEQ ID NO: 549 - protein, 112 aa, Artificial Sequence; identical to SEQ ID NO: 61
  Description of Artificial Sequence: Synthetic polypeptide

SEQ ID NO: 550 - protein, 119 aa, Artificial Sequence
  Description of Artificial Sequence: Synthetic polypeptide
QVQLVQSGAEVKKPGASVKVSCKASGYTFESYDMHWVRQAPGQRLEWMGWINAGTGATVYSQKFQGRVTITRDTSASTAYMELSSLRSEDTAVYYCARDAYHHYFYDVWGQGTLVTVSS

SEQ ID NO: 551 - protein, 112 aa, Artificial Sequence; identical to SEQ ID NO: 61
  Description of Artificial Sequence: Synthetic polypeptide

SEQ ID NO: 552 - protein, 119 aa, Artificial Sequence
  Description of Artificial Sequence: Synthetic polypeptide
QVQLVQSGAEVKKPGASVKVSCKASGYTFDSYSMHWVRQAPGQRLEWMGWINPDTGATDYSQKFQGRVTITRDTSASTAYMELSSLRSEDTAVYYCARDHYGHYFYDVWGQGTLVTVSS

SEQ ID NO: 553 - protein, 112 aa, Artificial Sequence; identical to SEQ ID NO: 61
  Description of Artificial Sequence: Synthetic polypeptide

SEQ ID NO: 554 - protein, 119 aa, Artificial Sequence; identical to SEQ ID NO: 130
  Description of Artificial Sequence: Synthetic polypeptide

SEQ ID NO: 555 - protein, 112 aa, Artificial Sequence
  Description of Artificial Sequence: Synthetic polypeptide
DIVMTQSPDSLAVSLGERATINCKSSQSLLNARTGHNHLAWYQQKPGQPPKLLIYWASTRESGVPDRFSGSGSGTDFTLTISSLQAEDVAVYYCKQSHSHRTFGGGTKVEIK

SEQ ID NO: 556 - protein, 119 aa, Artificial Sequence
  Description of Artificial Sequence: Synthetic polypeptide
QVQLVQSGAEVKKPGASVKVSCKASGYTFADYAMHWVRQAPGQRLEWMGWINPGTGSTKYSQKFQGRVTITRDTSASTAYMELSSLRSEDTAVYYCARDAYGHYFYDHWGQGTLVTVSS

SEQ ID NO: 557 - protein, 112 aa, Artificial Sequence; identical to SEQ ID NO: 61
  Description of Artificial Sequence: Synthetic polypeptide

SEQ ID NO: 558 - protein, 119 aa, Artificial Sequence
  Description of Artificial Sequence: Synthetic polypeptide
QVQLVQSGAEVKKPGASVKVSCKASGYTFESYSMHWVRQAPGQRLEWMGWINPATGATDYSQKFQGRVTITRDTSASTAYMELSSLRSEDTAVYYCARDAYHHYFYDVWGQGTLVTVSS

SEQ ID NO: 559 - protein, 112 aa, Artificial Sequence; identical to SEQ ID NO: 61
  Description of Artificial Sequence: Synthetic polypeptide

SEQ ID NO: 560 - protein, 119 aa, Artificial Sequence
  Description of Artificial Sequence: Synthetic polypeptide
QVQLVQSGAEVKKPGASVKVSCKASGYTFTSYAMHWVRQAPGQRLQWMGWIDAGTGNTYYSQKFQGRVTITRDTSASTAYMELSSLRSEDTAVYYCARDAHGHYFYDVWGQGTLVTVSS

SEQ ID NO: 561 - protein, 112 aa, Artificial Sequence; identical to SEQ ID NO: 61
  Description of Artificial Sequence: Synthetic polypeptide

SEQ ID NO: 562 - protein, 119 aa, Artificial Sequence
  Description of Artificial Sequence: Synthetic polypeptide
QVQLVQSGAEVKKPGASVKVSCKASGYTFESYYMHWVRQAPGQRLERMGSIVAGTGATKYSQKFQGRVTITRDTSASTAYMELSSLRSEDTAVYYCARDHYGRYFYDVWGQGTPVTVSS

SEQ ID NO: 563 - protein, 112 aa, Artificial Sequence; identical to SEQ ID NO: 61
  Description of Artificial Sequence: Synthetic polypeptide

SEQ ID NO: 564 - protein, 119 aa, Artificial Sequence
  Description of Artificial Sequence: Synthetic polypeptide
QVQLVQSGAEVKKPGASVKVSCKASGYTFDSYTMHWVRQAPGQRLEWMGYINPDTGATYYSQKFQGRVTITRDTSASTAYMELSSLRSEDTAVYYCARDAYHHYFYDVWGQGTLVTVSS

SEQ ID NO: 565 - protein, 112 aa, Artificial Sequence; identical to SEQ ID NO: 61
  Description of Artificial Sequence: Synthetic polypeptide

SEQ ID NO: 566 - protein, 119 aa, Artificial Sequence
  Description of Artificial Sequence: Synthetic polypeptide
QVQLVQSGAEVKKPGASVKVSCKASGYTFTSYAMHWVRQAPGQRLEWMGWINPDTGATKYSQKFQGRVTITRDTSASTAYMELSSLRSEDTAVYYCARDAHGHYFYDVWGQGTLVTVSS

SEQ ID NO: 567 - protein, 112 aa, Artificial Sequence; identical to SEQ ID NO: 61
  Description of Artificial Sequence: Synthetic polypeptide

SEQ ID NO: 568 - protein, 119 aa, Artificial Sequence
  Description of Artificial Sequence: Synthetic polypeptide
QVQLVQSGAEVKKPGASVKVSCKASGYTFDSYAMHWVRQAPGQRLEWMGWINPNTGATTYSQKFQGRVTITRDTSASTAYMELSSLRSEDTAVYYCARDHYGHYFYDVWGQGTLVTVSS

SEQ ID NO: 569 - protein, 112 aa, Artificial Sequence; identical to SEQ ID NO: 61
  Description of Artificial Sequence: Synthetic polypeptide

SEQ ID NO: 570 - protein, 119 aa, Artificial Sequence
  Description of Artificial Sequence: Synthetic polypeptide
QVQLVQSGAEVKKPGASVKVSCKASGYTFADYAMHWVRQAPGQRLEWMGSINAGTGNTYYSQKFQGRVTITRDTSASTAYMELSSLRSEDTAVYYCARDAYGHYFYDVWGQGTLVTVSS

SEQ ID NO: 571 - protein, 112 aa, Artificial Sequence; identical to SEQ ID NO: 61
  Description of Artificial Sequence: Synthetic polypeptide

SEQ ID NO: 572 - protein, 119 aa, Artificial Sequence
  Description of Artificial Sequence: Synthetic polypeptide
QVQLVQSGAEVKKPGASVKVSCKASGYTFTDYNMHWVRQAPGQRLEWMGWINPLTGTTKYSQKFQGRVTITRDTSASTAYMELSSLRSEDTAVYYCARDAYHHYFYDVWGQGTLVTVSS

SEQ ID NO: 573 - protein, 112 aa, Artificial Sequence; identical to SEQ ID NO: 61
  Description of Artificial Sequence: Synthetic polypeptide

SEQ ID NO: 574 - protein, 119 aa, Artificial Sequence
  Description of Artificial Sequence: Synthetic polypeptide
QVQLVQSGAEVKKPGASVKVSCKASGYTFNDYAMHWVRQAPGQRLAWMGWIDAGTGNTYYSQKFQGRVTITRDTSASTAYMELSSLRSEDTAVYYCARDAHGHYFYDVWGQGTLVTVSS

SEQ ID NO: 575 - protein, 112 aa, Artificial Sequence; identical to SEQ ID NO: 61
  Description of Artificial Sequence: Synthetic polypeptide

SEQ ID NO: 576 - protein, 12 aa, Artificial Sequence
  Description of Artificial Sequence: Synthetic peptide
ARDAYGRYFYDV

SEQ ID NO: 577 - protein, 17 aa, Artificial Sequence
  Description of Artificial Sequence: Synthetic peptide
KSSQSLLNARTGKNYLA

SEQ ID NO: 578 - protein, 8 aa, Artificial Sequence
  Description of Artificial Sequence: Synthetic peptide
KQSYSRRT

SEQ ID NO: 579 - protein, 12 aa, Artificial Sequence
  Description of Artificial Sequence: Synthetic peptide
ARDAYHRYFYDH

SEQ ID NO: 580 - protein, 17 aa, Artificial Sequence
  Description of Artificial Sequence: Synthetic peptide
KSSQSLLNSHTGKNYLA

SEQ ID NO: 581 - protein, 8 aa, Artificial Sequence
  Description of Artificial Sequence: Synthetic peptide
KQSYSRRT

SEQ ID NO: 582 - protein, 12 aa, Artificial Sequence
  Description of Artificial Sequence: Synthetic peptide
ARDAHHRYFYDV

SEQ ID NO: 583 - protein, 17 aa, Artificial Sequence
  Description of Artificial Sequence: Synthetic peptide
KSSQSLLNAHTGHNYLA

SEQ ID NO: 584 - protein, 8 aa, Artificial Sequence
  Description of Artificial Sequence: Synthetic peptide
KQSYSRRT

SEQ ID NO: 585 - protein, 12 aa, Artificial Sequence
  Description of Artificial Sequence: Synthetic peptide
ARDHYHRYFYDV

SEQ ID NO: 586 - protein, 17 aa, Artificial Sequence
  Description of Artificial Sequence: Synthetic peptide
KSSQSLLNARTGHNYLA

SEQ ID NO: 587 - protein, 8 aa, Artificial Sequence
  Description of Artificial Sequence: Synthetic peptide
KQSHSHRT

SEQ ID NO: 588 - protein, 12 aa, Artificial Sequence
  Description of Artificial Sequence: Synthetic peptide
ARDAHHRYFYDV

SEQ ID NO: 589 - protein, 17 aa, Artificial Sequence
  Description of Artificial Sequence: Synthetic peptide
KSSQSLLNAHEGKNYLA

SEQ ID NO: 590 - protein, 8 aa, Artificial Sequence
  Description of Artificial Sequence: Synthetic peptide
KQSHSHRT

SEQ ID NO: 591 - protein, 335 aa, Homo sapiens
QDGNEEMGGITQTPYKVSISGTTVILTCPQYPGSEILWQHNDKNIGGDEDDKNIGSDEDHLSLKEFSELEQSGYYVCYPRGSKPEDANFYLYLRARVCENCMEMDGGSDKTHTCPPCPAPELLGGPSVFLFPPKPKDTLMISRTPEVTCVVVDVSHEDPEVKFNWYVDGVEVHNAKTKPREEQYASTYRVVSVLTVLHQDWLNGKEYKCKVSNKALPAPIEKTISKAKGQPREPQVYTLPPSRDELTKNQVSLTCLVKGFYPSDIAVEWESNGQPENNYKTTPPVLDSDGSFFLYSKLTVDKSRWQQGNVFSCSVMHEALHNHYTQKSLSLSPGK

SEQ ID NO: 592 - protein, 326 aa, Macaca fascicularis
QDGNEEMGSITQTPYQVSISGTTVILTCSQHLGSEAQWQHNGKNKEDSGDRLFLPEFSEMEQSGYYVCYPRGSNPEDASHHLYLKARVCENCMEMDGGSDKTHTCPPCPAPELLGGPSVFLFPPKPKDTLMISRTPEVTCVVVDVSHEDPEVKFNWYVDGVEVHNAKTKPREEQYASTYRVVSVLTVLHQDWLNGKEYKCKVSNKALPAPIEKTISKAKGQPREPQVYTLPPSRDELTKNQVSLTCLVKGFYPSDIAVEWESNGQPENNYKTTPPVLDSDGSFFLYSKLTVDKSRWQQGNVFSCSVMHEALHNHYTQKSLSLSPGK

SEQ ID NO: 593 - protein, 12 aa, Artificial Sequence
  See specification as filed for detailed description of substitutions and preferred embodiments
  misc_feature (5)..(5): Xaa can be Thr, His, or Tyr (T, H, or Y)
  misc_feature (6)..(6): Xaa can be Gly or His (G or H)
  misc_feature (7)..(7): Xaa can be His or Arg (H or R)
  misc_feature (8)..(8): Xaa can be Val or Tyr (V or Y)
  misc_feature (12)..(12): Xaa can be Val or His (V or H)
ARDAXXXXFYDX

SEQ ID NO: 594 - protein, 17 aa, Artificial Sequence
  See specification as filed for detailed description of substitutions and preferred embodiments
  misc_feature (9)..(9): Xaa can be Ala or Ser (A or S)
  misc_feature (10)..(10): Xaa can be Arg or His (R or H)
  misc_feature (13)..(13): Xaa can be His or Lys (H or K)
KSSQSLLNXXTGXNYLA

SEQ ID NO: 595 - protein, 17 aa, Artificial Sequence
  See specification as filed for detailed description of substitutions and preferred embodiments
  misc_feature (8)..(8): Xaa can be Leu, Phe, Asn, or Ala (L, F, N, or A)
  misc_feature (10)..(10): Xaa can be Thr or Lys (T or K)
WIDAGTGXTXYSQKFQG

SEQ ID NO: 596 - protein, 12 aa, Artificial Sequence
  See specification as filed for detailed description of substitutions and preferred embodiments
  misc_feature (2)..(2): Xaa can be Arg or His (R or H)
  misc_feature (4)..(4): Xaa can be His or Ala (H or A)
  misc_feature (5)..(5): Xaa can be His or Tyr (H or Y)
  misc_feature (6)..(6): Xaa can be His, Gly, or Pro (H, G, or P)
  misc_feature (7)..(7): Xaa can be Arg or His (R or H)
  misc_feature (8)..(8): Xaa can be Tyr, Ile, or Val (Y, I, or V)
  misc_feature (9)..(9): Xaa can be Phe or His (F or H)
  misc_feature (12)..(12): Xaa can be Val or His (V or H)
AXDXXXXXXYDX

SEQ ID NO: 597 - protein, 17 aa, Artificial Sequence
  See specification as filed for detailed description of substitutions and preferred embodiments
  misc_feature (8)..(8): Xaa can be Asn or His (N or H)
  misc_feature (10)..(10): Xaa can be Arg or His (R or H)
  misc_feature (11)..(11): Xaa can be Thr or Glu (T or E)
  misc_feature (12)..(12): Xaa can be Gly or His (G or H)
  misc_feature (13)..(13): Xaa can be His or Lys (H or K)
  misc_feature (15)..(15): Xaa can be His or Tyr (H or Y)
KSSQSLLXAXXXXNXLA

SEQ ID NO: 598 - protein, 8 aa, Artificial Sequence
  See specification as filed for detailed description of substitutions and preferred embodiments
  misc_feature (1)..(1): Xaa can be His or Lys (H or K)
  misc_feature (4)..(4): Xaa can be His or Tyr (H or Y)
  misc_feature (5)..(5): Xaa can be Ser, His, Leu, Val, or Lys (S, H, L, V, or K)
  misc_feature (6)..(6): Xaa can be His, Arg, or Glu (H, R, or E)
XQSXXXRT

What is claimed is:

1. An anti-cluster of differentiation three (“CD3”) antibody and/or antigen-binding fragment comprising:
(a) a variable heavy (V_{H}) chain polypeptide comprising a V_{H} chain CDR3 (CDRH3) selected from the group consisting of:
i. AX₁DX₂X₃X₄X₅X₆X₇X₈DX₉, wherein X₁ is R or H, wherein X₂ is A, H, M, or Q, wherein X₃ is Y, H, S, G, A, T, V, or R; wherein X₄ is G, H, P, E, or R; wherein X₅ is H or R, wherein X₆ is Y, N, F, H, D, E, S, L, M, I, G, A, Q, or T; wherein X₇ is F or H; wherein X₈ is Y or H; wherein X₉ is V, H, or M; and, optionally, wherein at least one of X₁, X₂, X₃, X₄, X₅, X₆, X₇, X₈, and X₉ is H (SEQ ID NO: 58);
ii. ARDX₁X₂X₃X₄YFYDX₅, wherein X₁ is H or A, wherein X₂ is T, Y, or H, wherein X₃ is G or H, wherein X₄ is H, R, V, or I, wherein X₅ is V or H, and, optionally, wherein at least one of X₁, X₂, X₃, X₄, and X₅ is H (SEQ ID NO: 43);
iii. AX₁DX₂YX₃HX₄FYDV, wherein X₁ is R or H, wherein X₂ is A or H, wherein X₃ is G, H, or P, wherein X₄ is Y, H, D, V, E, S, N, L, M, I, G, A, Q, or T, and, optionally, wherein at least one of X₁, X₂, X₃, and X₄ is H (SEQ ID NO: 1);
iv. ARDX₁YGX₂X₃X₄YDX₅ wherein X₁ is A or H, wherein X₂ is R or H, wherein X₃ is H or Y, wherein X₄ is F or H, wherein X₅ is H or V, and, optionally, wherein at least one of X₁, X₂, X₃, X₄, and X₅ is H (SEQ ID NO: 2):
v. ARDAHX₁X₂YX₃X₄DX₅, wherein X₁ is G, E, or R, wherein X₂ is R or H, wherein X₃ is F or H, wherein X₄ is Y or H, wherein X₅ is V or H, and, optionally, wherein at least one of X₁, X₂, X₃, X₄, and X₅ is H (SEQ ID NO: 3);
vi. ARDAX₁HRX₂FYDV, wherein X₁ is H, Y, S, G, A, T, V, or R, wherein X₂ is Y or H, and, optionally, wherein at least one of X₁ and X₂ is H (SEQ ID NO: 4);
vii. ARDX₁YHRYFYDX₂, wherein X₁ is H or A, wherein X₂ is H, V, or M, and, optionally, wherein at least one of X₁ and X₂ is H (SEQ ID NO: 5);
viii. AX₁DAYX₂X₃X₄HX₅DV, wherein X₁ is R or H, wherein X₂ is G or H, wherein X₃ is H or R, wherein X₄ is N, F, or Y, wherein X₅ is Y or H, and, optionally, wherein at least one of X₁, X₂, X₃, X₄, and X₅ is H (SEQ ID NO: 6);
ix. ARDX₁X₂GRYFYDV, wherein X₁ is M, Q, or H, wherein X₂ is R or H, and, optionally, wherein at least one of X₁ and X₂ is H (SEQ ID NO: 7);
x. ARDX₁X₂X₃RYFYDX₄, wherein X₁ is H or A, wherein X₂ is T, Y, or H, wherein X₃ is G or H, wherein X₄ is V or H, and, optionally, wherein at least one of X₁, X₂, X₃, and X₄ is H (SEQ ID NO: 8);
xi. ARDAX₁X₂X₃X₄FYDX₅, wherein X₁ is T, H, or Y, wherein X₂ is G or H, wherein X₃ is H or R, wherein X₄ is V or Y, wherein X₅ is V or H, and wherein, optionally, at least one of X₁, X₂, X₃, and X₅ is H (SEQ ID NO: 593); and
xii. AX₁DX₂X₃X₄X₅X₆X₇YDX₈, wherein X₁ is R or H, wherein X₂ is H or A, wherein X₃ is H or Y, wherein X₄ is H, G, or P, wherein X₅ is R or H, wherein X₆ is Y, I, or V, wherein X₇ is F or H, wherein X₈ is V or H, and wherein, optionally, at least one of X₁, X₂, X₃, X₄, X₅, X₇, and X₈ is H (SEQ ID NO: 596).
(b) a variable heavy (V_{H}) chain polypeptide comprising a V_{H} chain CDR2 (CDRH2) selected from the group consisting of:
i. X₁IX₂X₃X₄X₅X₆X₇TX₈YSQKFQG, wherein X₁ is W, S, Y, F, G, or D, wherein X₂ is N, T, D, V, or H, wherein X₃ is A, P, or S, wherein X₄ is G, A, S, N, D, L, V, H, Q, T, I, or Y, wherein X₅ is D or T, wherein X₆ is A or G, wherein X₇ is A, N, T, S, L, D, F, Y, or E, wherein X₈ is V, K, T, D, Y, F, A, H, N, L, I, or E, and, optionally, wherein at least one of X₁, X₂, X₃, X₄, X₅, X₆, X₇, and X₈ is H (SEQ ID NO: 59);
ii.
(SEQ ID NO: 9)
WIDLENANTIYDAKFQG;
iii. X₁INPX₂TGX₃TX₄YSQKFQG, wherein X₁ is W or Y, wherein X₂ is A, S, D, G, N, L, V, H, or Q, wherein X₃ is A, T, or S, and wherein X₄ is K, V, T, D, Y, F, or A (SEQ ID NO: 10);
iv. X₁IX₂AGTGX₃TX₄YSQKFQG, wherein X₁ is W, Y, or F, wherein X₂ is T, N, or D, wherein X₃ is A, T, or L, and wherein X₄ is A, K, V, H, T, or N (SEQ ID NO: 11);
v. X₁IDAGTGX₂TX₃YSQKFQG, wherein X₁ is S or W, wherein X₂ is L, N, D, or F, and wherein X₃ is D, Y, or K (SEQ ID NO: 12);
vi. X₁IX₂AGTGATX₃YSQKFQG, wherein X₁ is G, D, or S, wherein X₂ is I or D, and wherein X₃ is K or D (SEQ ID NO: 13);
vii. WINPX₁TGNTX₂YSQKFQG, wherein X₁ is D, T, L, S, or A, and wherein X₂ is D, V, L, or N (SEQ ID NO: 14);
viii. X₁INAGTGX₂TX₃YSQKFQG, wherein X₁ is Y or W, wherein X₂ is N, D, or A, and wherein X₃ is I or V (SEQ ID NO: 15);
ix. X₁INPX₂TGX₃TKYSQKFQG, wherein X₁ is W or Y, wherein X₂ is D, I or Y, and wherein X₃ is D, Y, or E (SEQ ID NO: 16);
x. SIX₁AGTGX₂TKYSQKFQG, wherein X₁ is N or V, and wherein X₂ is A or I (SEQ ID NO: 17);
xi. SINAGTGX₁TX₂YSQKFQG, wherein X₁ is F or N, and wherein X₂ is Y or D (SEQ ID NO: 18);
xii. X₁IX₂X₃GTGX₄TDYSQKFQG, wherein X₁ is D or W, wherein X₂ is N or H, wherein X₃ is A or S, and wherein X₄ is A or N (SEQ ID NO: 19);
xiii. WIDPX₁TGATX₂YSQKFQG, wherein X₁ is N, H, or Y, and wherein X₂ is V or K (SEQ ID NO: 20);
xiv. WIX₁PX₂TGNTKYSQKFQG, wherein X₁ is D or N, and wherein X₂ is L, I, or V (SEQ ID NO: 21);
xv.
(SEQ ID NO: 22)
SINAGDANTKYSQKFQG;
xv. SINAGDANTKYSQKFQG (SEQ ID NO: 22);
xvi. X₁IDPX₂TGATX₃YSQKFQG, wherein X₁ is D or W, wherein X₂ is D or V, and wherein X₃ is E or D (SEQ ID NO: 23);
xvii. WINAGDAATVYSQKFQG (SEQ ID NO: 24); and
xviii. WIDAGTGX₁TX₂YSQKFQG, wherein X₁ is L, F, N, or A and wherein X₂ is T or K (SEQ ID NO: 595).
(c) a variable heavy (V_{H}) chain polypeptide comprising a V_{H} chain CDR1 (CDRH1) selected from the group consisting of:
i.
(SEQ ID NO: 25)
FNIKDYHMH;
ii.
(SEQ ID NO: 26)
SNIKDYYMH;
iii.
(SEQ ID NO: 27)
SNIKDYHMH;
iv. YTFX₁X₂X₃X₄MH, wherein X₁ is A, K, D, Q, E, N, T, L, Y, S, P, G, H or V, wherein X₂ is T, S, or A, wherein X₃ is Y or I, and wherein X₄ is A, D, N, S, Y, T, I, V, L, E, P, R, or G (SEQ ID NO: 28);
v. YTFX₁X₂X₃X₄MH, wherein X₁ is T, D, A, N, or V, wherein X₂ is D, E, G, or Q, wherein X₃ is Y or D, and wherein X₄ is D, A, E, N, S, Y, or V (SEQ ID NO: 29);
vi. YTFTSX₁X₂MH, wherein X₁ is A, D, or T, and wherein X₂ is D, F, A, M, V, or Y (SEQ ID NO: 30);
vii. YTFX₁X₂YX₃MH, wherein X₁ is N or T, X₂ is Q or N, and X₃ is S, T, or A (SEQ ID NO: 31); and
viii. YTFX₁X₂YVMH, wherein X₁ is I or N, and wherein X₂ is K or R (SEQ ID NO: 32);
ix. FNIKDYYMH (SEQ ID NO: 47); and
x. YTFX₁X₂YX₃MH, wherein X₁ is E, S, or T, wherein X₂ is S or D, and wherein X₃ is A or D (SEQ ID NO: 31).
(d) a variable light (VL) chain polypeptide comprising a VL chain CDR3 (CDRL3) selected from the group consisting of:
i. X₁X₂SX₃X₄X₅RX₆, wherein X₁ is H, K, or G, wherein X₂ is Q or H, wherein X₃ is Y or H, wherein X₄ is S, H, D, T, V, M, or L, wherein X₅ is R or H, wherein X₆ is T or H, and, optionally, wherein at least one of X₁, X₂, X₃, X₄, X₅, and X₆ is H (SEQ ID NO: 33);
ii. KQSYX₁X₂RT, wherein X₁ is H, V, K, W, R, L, G, Y, or Q, wherein X₂ is H, L, E, W, G, M, P, T, Q, or V, and, optionally, wherein at least one of X₁ and X₂ is H (SEQ ID NO: 34);
iii. X₁QSX₂HX₃RT, wherein X₁ is K or H, wherein X₂ is H, Y, M, S, L, E, G, or W, wherein X₃ is R or K, and, optionally, wherein at least one of X₁ and X₂ is H(SEQ ID NO: 35);
iv. KQSX₁X₂X₃RT, wherein X₁ is Y or H, wherein X₂ is T, S, V, or K, wherein X₃ is R or H, and, optionally, wherein at least one of X₁ and X₃ is H (SEQ ID NO: 36);
v. KQSX₁X₂X₃RT, wherein X₁ is H or Y, wherein X₂ is T, S, or Q, wherein X₃ is R or H, and, optionally, wherein at least one of X₁ and X₃ is H (SEQ ID NO: 36); and
vi. X₁QSX₂X₃X₄RT, wherein X₁ is K or H, wherein X₂ is Y or H, wherein X₃ is S, H, L, V, or K, wherein X₄ is H, R, or E, and, optionally, wherein at least one of X₁, X₂, X₃, and X₄ is H (SEQ ID NO: 598);
(e) a variable light (VL) chain polypeptide comprising a VL chain CDR2 (CDRL2) of WASTRES (SEQ ID NO: 37); and/or
(f) a variable light (VL) chain polypeptide comprising a VL chain CDR1 (CDRL1) selected from the group consisting of:
i. KSSQSLLX₁X₂X₃X₄GX₅NX₆LA, wherein X₁ is N or H, wherein X₂ is A, R, or T, wherein X₃ is R or H, wherein X₄ is T, P, or E, wherein X₅ is H or K, wherein X₆ is H or Y, and, optionally, wherein at least one of X₁, X₃, X₅, and X₆ is H (SEQ ID NO: 38);
ii. KSSQSLLX₁AX₂THX₃NX₄LA, wherein X₁ is N or H, wherein X₂ is R or H, wherein X₃ is K or H, wherein X₄ is Y or H, and, optionally, wherein at least one of X₁, X₂, X₃, and X₄ is H (SEQ ID NO: 39);
iii.
(SEQ ID NO: 40)
KSSQSLLNASTAKNYLA;
iv.
(SEQ ID NO: 41)
KSSQSLLNARTRTNYLA;
v. KSSQSLLNX₁X₂X₃GX₄NX₅LA, wherein X₁ is S or A, wherein X₂ is R or H, wherein X₃ is E or T, wherein X₄ is H or K, wherein X₅ is H or Y, and, optionally, wherein at least one of X₂, X₄, and X₅ is H (SEQ ID NO: 42);
vi. KSSQSLLNX₁X₂TGX₃NYLA, wherein X₁ is A or S, wherein X₂ is R or H, wherein X₃ is H or K, and, optionally, wherein at least one of X₂ and X₃ is H (SEQ ID NO: 594); and
vii. KSSQSLLX₁AX₂X₃X₄X₅NX₆LA, wherein X₁ is N or H, wherein X₂ is R or H, wherein X₃ is T or E, wherein X₄ is G or H, wherein X₅ is H or K, wherein X₆ is H or Y, and wherein, optionally, at least one of X₁, X₂, X₄, X₅, and X₆ is H (SEQ ID NO: 597).

2. The anti-CD3 antibody and/or antigen-binding fragment according to claim 1, comprising:
(a) a CDRH3 comprising an amino acid sequence ARDX₁X₂X₃X₄YFYDX₅, wherein X₁ is H or A, wherein X₂ is T, Y, or H, wherein X₃ is G or H, X₄ is H, R, V, or I, wherein X₅ is V or H, and, optionally, wherein at least one of X₁, X₂, X₃, X₄, and X₅ is H (SEQ ID NO: 43);
(b) a CDRL3 comprising an amino acid sequence KQSX₁X₂X₃RT, wherein X₁ is Y or H, X₂ is T, S, V, or K, X₃ is R or H, and, optionally, wherein at least one of X₁ and X₃ is H (SEQ ID NO: 36); and/or
(c) a CDRL1 comprising an amino acid sequence KSSQSLLNX₁X₂X₃GX₄NX₅LA, wherein X₁ is S or A, wherein X₂ is R or H, wherein X₃ is E or T, wherein X₄ is H or K, wherein X₅ is H or Y, and, optionally, wherein at least one of X₂, X₄, and X₅ is H (SEQ ID NO: 42).

3. The anti-CD3 antibody or antigen-binding fragment according to claim 1, comprising:
(a) a CDRH3 comprising an amino acid sequence ARDAX₁X₂X₃X₄FYDX₅, wherein X₁ is T, H, or Y, wherein X₂ is G or H, wherein X₃ is H or R, wherein X₄ is V or Y, wherein X₅ is V or H, and wherein, optionally, at least one of X₁, X₂, X₃, and X₅ is H (SEQ ID NO: 593);
(b) a CDRH2 comprising an amino acid sequence WIDLENANTIYDAKFQG (SEQ ID NO: 9);
(c) a CDRH1 comprising an amino acid sequence FNIKDYYMH (SEQ ID NO: 47);
(d) a CDRL3 comprising an amino acid sequence KQSX₁X₂X₃RT, wherein X₁ is H or Y, wherein X₂ is T, S, or Q, wherein X₃ is R or H, and, optionally, wherein at least one of X₁ and X₃ is H (SEQ ID NO: 36);
(e) a CDRL2 comprising an amino acid sequence WASTRES (SEQ ID NO: 37); and/or
(f) a CDRL1 comprising an amino acid sequence KSSQSLLNX₁X₂TGX₃NYLA, wherein X₁ is A or S, wherein X₂ is R or H, wherein X₃ is H or K, and, optionally, wherein at least one of X₂ and X₃ is H (SEQ ID NO: 594).

4. The anti-CD3 antibody or antigen-binding fragment according to claim 1, comprising:
(a) a CDRH3 comprising an amino acid sequence AX₁DX₂X₃X₄X₅X₆X₇YDX₈, wherein X₁ is R or H, wherein X₂ is H or A, wherein X₃ is H or Y, wherein X₄ is H, G, or P, wherein X₅ is R or H, wherein X₆ is Y, I, or V, wherein X₇ is F or H, wherein X₈ is V or H, and wherein, optionally, at least one of X₁, X₂, X₃, X₄, X₅, X₇, and X₈ is H (SEQ ID NO: 596);
(b) a CDRH2 comprising an amino acid sequence selected from the group consisting of:
i. WIDLENANTIYDAKFQG (SEQ ID NO: 9); and
ii. WIDAGTGX₁TX₂YSQKFQG, wherein X₁ is L, F, N, or A and wherein X₂ is T or K (SEQ ID NO: 595);
(c) a CDRH1 comprising an amino acid sequence selected from the group consisting of:
i. FNIKDYYMH (SEQ ID NO: 47); and
ii. YTFX₁X₂YX₃MH, wherein X₁ is E, S, or T, wherein X₂ is S or D, and wherein X₃ is A or D (SEQ ID NO: 31);
(d) a CDRL3 comprising an amino acid sequence X₁QSX₂X₃X₄RT, wherein X₁ is K or H, wherein X₂ is Y or H, wherein X₃ is S, H, L, V, or K, wherein X₄ is H, R, or E, and, optionally, wherein at least one of X₁, X₂, X₃, and X₄ is H (SEQ ID NO: 598);
(e) a CDRL2 comprising an amino acid sequence WASTRES (SEQ ID NO: 37); and/or
(f) a CDRL1 comprising an amino acid sequence KSSQSLLX₁AX₂X₃X₄X₅NX₆LA, wherein X₁ is N or H, wherein X₂ is R or H, wherein X₃ is T or E, wherein X₄ is G or H, wherein X₅ is H or K, wherein X₆ is H or Y, and wherein, optionally, at least one of X₁, X₂, X₄, X₅, and X₆ is H (SEQ ID NO: 597).

5. The anti-CD3 antibody or antigen-binding fragment according to claim 1, wherein:
(a) said antibody or antigen-binding fragment elicits T cell activation or T cell killing while displaying a decreased propensity to elicit cytokine production to levels capable of inducing cytokine release syndrome;
(b) the antibody or antigen-binding fragment comprises a multispecific antibody;
(c) the antibody or antigen-binding fragment comprises a bispecific antibody;
(d) the antibody or antigen-binding fragment comprises an scFv;
(e) the antibody or antigen-binding fragment comprises at least a second antigen-binding domain that specifically binds to an oncology target; an immune-oncology target; a neurodegenerative disease targets; an autoimmune disorder target; an infectious disease target; a metabolic disease target; a cognitive disorder target; a blood-brain barrier target; or a blood disease target;
(f) the antibody or antigen-binding fragment comprises at least a second antigen-binding domain that specifically binds to an antigen selected from the group consisting of: 17-IA, 4-1BB, 4Dc, 6-keto-PGF1a, 8-iso-PGF2a, 8-oxo-dG, A1 Adenosine Receptor, A33, ACE, ACE-2, Activin, Activin A, Activin AB, Activin B, Activin C, Activin RIA, Activin RIA ALK-2, Activin RIB ALK-4, Activin RIIA, Activin RUB, ADAM, ADAM10, ADAM12, ADAM 15, ADAM 17/T ACE, ADAM8, ADAM9, ADAMTS, ADAMTS4, ADAMTS5, Addressins, aFGF, ALCAM, ALK, ALK-1, ALK-7, alpha-1-antitrypsin, alpha-V/beta-1 antagonist, ANG, Ang, APAF-1, APE, APJ, APP, APRIL, AR, ARC, ART, Artemin, anti-Id, ASPARTIC, Atrial natriuretic factor, av/b3 integrin, Axl, b2M, B7-1, B7-2, B7-H, B-lymphocyte Stimulator (BlyS), BACE, BACE-1, Bad, BAFF, BAFF-R, Bag-1, BAK, Bax, BCA-1, BCAM, Bel, BCMA, BDNF, b-ECGF, bFGF, BID, Bik, BFM, BLC, BL-CAM, BLK, BMP, BMP-2 BMP-2a, BMP-3 Osteogenin, BMP-4 BMP-2b, BMP-5, BMP-6 Vgr-1, BMP-7 (OP-1), BMP-8 (BMP-8a, OP-2), BMPR, BMPR-IA (ALK-3), BMPR-IB (ALK-6), BRK-2, RPK-1, BMPR-II (BRK-3), BMPs, b-NGF, BOK, Bombesin, Bone-derived neurotrophic factor, BPDE, BPDE-DNA, BTC, complement factor 3 (C3), C3a, C4, C5, C5a, CIO, CA125, CAD-8, Calcitonin, cAMP, carcinoembryonic antigen (CEA), carcinoma-associated antigen, Cathepsin A, Cathepsin B, Cathepsin C/DPPI, Cathepsin D, Cathepsin E, Cathepsin H, Cathepsin L, Cathepsin O, Cathepsin S, Cathepsin V, Cathepsin X/Z/P, CBL, CCI, CCK2, CCL, CCL1, CCL11, CCL12, CCL13, CCL 14, CCL15, CCL16, CCL17, CCL18, CCL19, CCL2, CCL20, CCL21, CCL22, CCL23, CCL24, CCL25, CCL26, CCL27, CCL28, CCL3, CCL4, CCL5, CCL6, CCL7, CCL8, CCL9/10, CCR, CCR1, CCR10, CCR10, CCR2, CCR3, CCR4, CCR5, CCR6, CCR7, CCR8, CCR9, CD1, CD2, CD4, CD5, CD6, CD7, CD8, CD10, CD11a, CD11b, CD11c, CD13, CD14, CD15, CD16, CD18, CD19, CD20, CD21, CD22, CD23, CD25, CD27L, CD28, CD29, CD30, CD30L, CD32, CD33 (p67 proteins), CD34, CD38, CD40, CD40L, CD44, CD45, CD46, CD49a, CD52, CD54, CD55, CD56, CD61, CD64, CD66e, CD74, CD80 (B7-1), CD89, CD95, CD123, CD137, CD138, CD140a, CD146, CD147, CD148, CD152, CD164, CEACAM5, CFTR, cGMP, CINC, Clostridium botulinum toxin, Clostridium perfringens toxin, CKb8-1, CLC, CMV, CMV UL, CNTF, CNTN-1, COX, C-Ret, CRG-2, CT-1, CTACK, CTGF, CTLA-4, CX3CL1, CX3CR1, CXCL, CXCL1, CXCL2, CXCL3, CXCL4, CXCL5, CXCL6, CXCL7, CXCL8, CXCL9, CXCL10, CXCL11, CXCL12, CXCL13, CXCL14, CXCL15, CXCL16, CXCR, CXCR1, CXCR2, CXCR3, CXCR4, CXCR5, CXCR6, cytokeratin tumor-associated antigen, DAN, DCC, DcR3, DC-SIGN, Decay accelerating factor, des(1-3)-IGF-I (brain IGF-1), Dhh, digoxin, DNAM-1, Dnase, Dpp, DPPIV/CD26, Dtk, ECAD, EDA, EDA-A1, EDA-A2, EDAR, EGF, EGFR (ErbB-1), EMA, EMMPRIN, EN A, endothelin receptor, Enkephalinase, eNOS, Eot, eotaxin1, EpCAM, Ephrin B2/EphB4, EPO, ERCC, E-selectin, ET-1, Factor IIa, Factor VII, Factor VIIIc, Factor IX, fibroblast activation protein (FAP), Fas, FcR1, FEN-1, Ferritin, FGF, FGF-19, FGF-2, FGF3, FGF-8, FGFR, FGFR-3, Fibrin, FL, FLIP, Flt-3, Flt-4, Follicle stimulating hormone, Fractalkine, FZD1, FZD2, FZD3, FZD4, FZD5, FZD6, FZD7, FZD8, FZD9, FZD10, G250, Gas 6, GCP-2, GCSF, GD2, GD3, GDF, GDF-1, GDF-3 (Vgr-2), GDF-5 (BMP-14, CDMP-1), GDF-6 (BMP-13, CDMP-2), GDF-7 (BMP-12, CDMP-3), GDF-8 (Myostatin), GDF-9, GDF-15 (MIC-1), GDNF, GFAP, GFRa-1, GFR-alpha 1, GFR-alpha2, GFR-alpha3, GITR, Glucagon, Glut 4, glycoprotein IIb/IIIa (GP IIb/IIIa), GM-CSF, gp130, gp72, GRO, Growth hormone releasing factor, Hapten (NP-cap or NIP-cap), HB-EGF, HCC, HCMV gB envelope glycoprotein, HCMV) gH envelope glycoprotein, HCMV UL, Hemopoietic growth factor (HGF), Hep B gp120, heparanase, Her2, Her2/neu (ErbB-2), Her3 (ErbB-3), Her4 (ErbB-4), herpes simplex virus (HSV) gB glycoprotein, HSV gD glycoprotein, HGFA, High molecular weight melanoma-associated antigen (HMW-MAA), HIV gp120, HIV IIIB gp 120 V3 loop, HLA, HLA-DR, HM1.24, HMFG PEM, HRG, Hrk, human cardiac myosin, human cytomegalovirus (HCMV), human growth hormone (HGH), HVEM, 1-309, IAP, ICAM, ICAM-1, ICAM-3, ICE, ICOS, IFNg, Ig, IgA receptor, IgE, IGF, IGF binding proteins, IGF-1R, IGFBP, IGF-I, IGF-II, IL, IL-1, IL-1R, IL-2, IL-2R, IL-4, IL-4R, IL-5, IL-5R, IL-6, IL-6R, IL-8, IL-9, IL-10, IL-12, IL-13, IL-15, IL-18, IL-18R, IL-23, interferon (INF)-alpha, INF-beta, INF-gamma, Inhibin, iNOS, Insulin A-chain, Insulin B-chain, Insulin-like growth factor 1, integrin alpha2, integrin alpha3, integrin alpha4, integrin alpha4/beta 1, integrin, alpha4/beta7, integrin alpha5 (alphaV), integrin alpha5/beta1, integrin alpha5/beta3, integrin alpha6, integrin beta1, integrin beta2, interferon gamma, IP-10, 1-TAC, JE, Kallikrein 2, Kallikrein 5, Kallikrein 6, Kallikrein 11, Kallikrein 12, Kallikrein 14, Kallikrein 15, Kallikrein L1, Kallikrein L2, Kallikrein L3, Kallikrein L4, KC, KDR, Keratinocyte Growth Factor (KGF), laminin 5, LAMP, LAP, LAP (TGF-1), Latent TGF-1, Latent TGF-1 bpl, LBP, LDGF, LECT2, Lefty, Lewis-Y antigen, Lewis-Y related antigen, LFA-1, LFA-3, Lfo, LIF, LIGHT, lipoproteins, LIX, LKN, Lptn, L-Selectin, LT-a, LT-b, LTB4, LTBP-1, Lung surfactant, Luteinizing hormone, Lymphotoxin Beta Receptor, Mac-1, MAdCAM, MAG, MAP2, MARC, MCAM, MCAM, MCK-2, MCP, M-CSF, MDC, Mer, a metalloprotease, MGDF receptor, MGMT, MHC (HLA-DR), MIF, MIG, MIP, MIP-1-alpha, MK, MMAC1, MMP, MMP-1, MMP-10, MMP-11, MMP-12, MMP-13, MMP-14, MMP-15, MMP-2, MMP-24, MMP-3, MMP-7, MMP-8, MMP-9, MPIF, Mpo, MSK, MSP, mucin (Muc1), MUC18, Muellerian-inhibiting substance, Mug, MuSK, NAIP, NAP, NCAD, N-Cadherin, NCA 90, NCAM, NCAM, Neprilysin, Neurotrophin-3, -4, or -6, Neurturin, Neuronal growth factor (NGF), NGFR, NGF-beta, nNOS, NO, NOS, Npn, NRG-3, NT, NTN, OB, OGG1, OPG, OPN, OSM, OX40L, OX40R, p150, p95, PADPr, Parathyroid hormone, PARC, PARP, PBR, PBSF, PCAD, P-Cadherin, PCNA, PDGF, PDGF, PDK-1, PECAM, PEM, PF4, PGE, PGF, PGI2, PGJ2, PIN, PLA2, placental alkaline phosphatase (PLAP), PIGF, PLP, PP14, Proinsulin, Prorelaxin, Protein C, PS, PSA, PSCA, prostate specific membrane antigen (PSMA), PTEN, PTHrp, Ptk, PTN, R51, RANK, RANKL, RANTES, Relaxin A-chain, Relaxin B-chain, renin, respiratory syncytial virus (RSV) F, RSV Fgp, Ret, Rheumatoid factors, RLIP76, RPA2, RSK, S100, SCF/KL, SDF-1, SERINE, Serum albumin, sFRP-3, Shh, SIGIRR, SK-1, SLAM, SLPI, SMAC, SMDF, SMOH, SOD, SPARC, Stat, STEAP, STEAP-II, TACE, TACI, TAG-72 (tumor-associated glycoprotein-72), TARC, TCA-3, T-cell receptors (e.g., T-cell receptor alpha/beta), TdT, TECK, TEM1, TEM5, TEM7, TEM8, TERT, testicular PLAP-like alkaline phosphatase, TfR, TGF, TGF-alpha, TGF-beta, TGF-beta Pan Specific, TGF-beta RI (ALK-5), TGF-beta RII, TGF-beta RIIb, TGF-beta RIII, TGF-beta1, TGF-beta2, TGF-beta3, TGF-beta4, TGF-beta5, Thrombin, Thymus Ck-1, Thyroid stimulating hormone, Tie, TIMP, TIQ, Tissue Factor, TMEFF2, Tmpo, TMPRSS2, TNF, TNF-alpha, TNF-alpha beta, TNF-beta2, TNFc, TNF-RI, TNF-RII, TNFRSF10A (TRAIL R1 Apo-2, DR4), TNFRSFIOB (TRAIL R2 DR5, KILLER, TRICK-2A, TRICK-B), TNFRSF10C (TRAIL R3 DcR1, LIT, TRID), TNFRSF10D (TRAIL R4 DcR2, TRUNDD), TNFRSF11A (RANK ODF R, TRANCE R), TNFRSF11B (OPG OC1F, TR1), TNFRSF12 (TWEAK R FN14), TNFRSF13B (TACI), TNFRSF13C (BAFF R), TNFRSF14 (HVEM ATAR, HveA, LIGHT R, TR2), TNFRSF16 (NGFR p75NTR), TNFRSF17 (BCMA), TNFRSF 18 (GITR AITR), TNFRSF19 (TROY TAJ, TRADE), TNFRSF19L (RELT), TNFRSFIA (TNF RI CD120a, p55-60), TNFRSFIB (TNF RII CD120b, p75-80), TNFRSF26 (TNFRH3), TNFRSF3 (LTbR TNF RIII, TNFC R), TNFRSF4 (OX40 ACT35, TXGP1 R), TNFRSF 5 (CD40 p50), TNFRSF6 (Fas Apo-1, APT1, CD95), TNFRSF6B (DcR3 M68, TR6), TNFRSF7 (CD27), TNFRSF8 (CD30), TNFRSF9 (4-1BB CD137, ILA), TNFRSF21 (DR6), TNFRSF22 (DcTRAIL R2 TNFRH2), TNFRST23 (DcTRAIL R1 TNFRH1), TNFRSF25 (DR3 Apo-3, LARD, TR-3, TRAMP, WSL-1), TNFSF10 (TRAIL Apo-2 Ligand, TL2), TNFSF11 (TRANCE/RANK Ligand ODF, OPG Ligand), TNFSF12 (TWEAK Apo-3 Ligand, DR3 Ligand), TNFSF13 (APRIL TALL2), TNFSF13B (BAFF BLYS, TALL1, THANK, TNFSF20), TNFSF14 (LIGHT HVEM Ligand, LTg), TNFSF15 (TLIA/VEGI), TNFSF18 (GITR Ligand AITR Ligand, TL6), TNFSFIA (TNF-a Conectin, DIF, TNFSF2), TNFSF1B (TNF-b LTa, TNFSF1), TNFSF3 (LTb TNFC, p33), TNFSF4 (OX40 Ligand gp34, TXGP1), TNFSF5 (CD40 Ligand CD154, gp39, HIGM1, IMD3, TRAP), TNFSF6 (Fas Ligand Apo-1 Ligand, APT1 Ligand), TNFSF7 (CD27 Ligand CD70), TNFSF8 (CD30 Ligand CD153), TNFSF9 (4-1BB Ligand CD137 Ligand), TP-1, t-PA, Tpo, TRAIL, TRAIL R, TRAIL-R1, TRAIL-R2, TRANCE, transferring receptor, TRF, Trk, TROP-2, TSG, TSLP, tumor-associated antigen CA 125, tumor-associated antigen expressing Lewis Y related carbohydrate, TWEAK, TXB2, Ung, uPAR, uPAR-1, Urokinase, VCAM, VCAM-1, VECAD, VE-Cadherin, VE-cadherin-2, VEFGR-1 (fit-1), VEGF, VEGFR, VEGFR-3 (fit-4), VEGI, VFM, Viral antigens, VLA, VLA-1, VLA-4, VNR integrin, von Willebrands factor, WIF-1, WNT1, WNT2, WNT2B/13, WNT3, WNT3A, WNT4, WNT5A, WNT5B, WNT6, WNT7A, WNT7B, WNT8A, WNT8B, WNT9A, WNT9A, WNT9B, WNT10A, WNT10B, WNT11, WNT16, XCL1, XCL2, XCR1, XCR1, XEDAR, X1AP, XPD, CTLA4 (cytotoxic T lymphocyte antigen-4), PD1 (programmed cell death protein 1), PD-L1 (programmed cell death ligand 1), LAG-3 (lymphocyte activation gene-3), TIM-3 (T cell immunoglobulin and mucin protein-3), hormone receptors and growth factors;
(g) the antibody or antigen-binding fragment comprises at least a second antigen-binding domain that specifically binds to an antigen selected from the group consisting of: BCMA, CTLA4 (cytotoxic T lymphocyte antigen-4), PD1 (programmed cell death protein 1), PD-L1 (programmed cell death ligand 1), LAG-3 (lymphocyte activation gene-3), TIM-3, CD20, CD2, CD19, Her2, EGFR, EpCAM, FcyRIIIa (CD16), FcyRIIa (CD32a), FcyRIIb (CD32b), FcyRI (CD64), Toll-like receptors (TLRs), TLR4, TLR9, cytokines, IL-2, IL-5, IL-13, IL-6, IL-17, IL-12, IL-23, TNFa, TGFb, cytokine receptors, IL-2R, chemokines, chemokine receptors, growth factors, VEGF, and HGF;
(h) the antibody or antigen-binding fragment is comprised in a chimeric antigen receptor (CAR), which optionally comprises at least one transmembrane domain, and at least one intracellular domain from a T-cell receptor, optionally a CD3ζ subunit, and at least one co-stimulatory domain;
(i) the antibody or antigen-binding fragment comprises an scFv2-Fc2 and/or scFv-IgG;
(j) the antibody or antigen-binding fragment comprises an IgG constant domain; and/or
(k) the antibody or antigen-binding fragment comprises at least a second antigen-binding domain that specifically binds to an antigen, wherein said antibody comprises a multispecific format selected from the group consisting of: Fab-Fc-scFv, “bottle-opener”, Mab-scFv, Mab-Fv, Dual scFv, central Fv, central scFv, one-arm central scFv, Fab-Fab, Fab-Fv, mAb-Fv, mAb-Fab, DART, BiTE, common light chain-IgG, TandAb, Cross-Mab, SEED, BEAT, TrioMab, and DuetMab.

6. The anti-CD3 antibody and/or antigen-binding fragment according to claim 1, which binds to CD3 or CD3-expressing cells with a greater binding affinity at pH 6.0 than at pH 7.4.

7. An isolated or recombinant nucleic acid sequence encoding an antibody or antigen-binding fragment according to claim 1.

8. An expression vector comprising an isolated or recombinant nucleic acid according to claim 7.

9. A host cell transfected, transformed, or transduced with a nucleic acid according to claim 7, or an expression vector comprising said nucleic acid, wherein the host cell is optionally a mammalian cell or a yeast cell.

10. A pharmaceutical composition comprising an antibody or antigen-binding fragment according to claim 1 or a host cell which expresses said antibody or antigen-binding fragment, and a pharmaceutically acceptable carrier and/or excipient.

11. A method of treating a disorder in a mammal in need of such treatment, wherein the disorder comprises a proliferative disorder, an oncological disorder, an immuno-oncological disorder, a neurological disorder, a neurodegenerative disorder, or an autoimmune disorder, comprising administering an effective amount of at least one antibody or antigen-binding fragment according to claim 1 or a host cell which expresses said antibody or antigen-binding fragment, optionally an immune cell, further optionally a T or NK cell.

12. The method according to claim 11, wherein the method further comprises administering to the mammal an additional therapeutic agent, optionally wherein the mammal is a human.
